(19) United States
(12) Patent Application Publication
(10) Pub. No.: US 2024/0182874 A1
(43) Pub. Date: Jun. 6, 2024

(54) NOVEL FAMILY OF DNA POLYMERASES ACCEPTING 2-AMINOADENINE AND REJECTING ADENINE IN THEIR SUBSTRATES

(71) Applicants: THE EUROPEAN SYNDICATE OF SYNTHETIC SCIENTISTS AND INDUSTRIALISTS, Paris (FR); COMMISSARIAT À L´ÉNERGIE ATOMIQUE ET AUX ÉNERGIES ALTERNATIVES, Paris (FR)

(72) Inventors: Pierre-Yves Vincent BOURGUIGNON, Berlin (DE); Philippe MARLIÈRE, Luxembourg (LU); Valérie PEZO, Evry cedex (FR); Raphael MEHEUST, Evry cedex (FR)

(21) Appl. No.: 18/286,072

(22) PCT Filed: Apr. 13, 2022
(86) PCT No.: PCT/EP2022/059852

§ 371 Date: Oct. 6, 2023

(30) Foreign Application Priority Data
Apr. 15, 2021 (EP) 21 168 699.3

(51) Int. Cl. C12N 9/12; C12N 15/63; C12P 19/34

(52) U.S. Cl. CPC C12N 9/1252; C12N 15/63; C12P 19/34; C12Y 207/07007

(57) ABSTRACT

Described is a novel family of DNA polymerases identified in bacteriophages (mainly from the family of Siphiroviridae) which are able to accept 2-amino-2′-deoxyadenosine 5′-triphosphate (dZTP) as a substrate but which do not accept deoxyadenosine 5′-triphosphate (dATP) as a substrate. Also described are recombinant nucleic acid molecules, encoding such polymerases, vectors comprising such nucleic acid molecules, host cells transformed with such nucleic acid molecules or vectors as well as to methods for producing DNA molecules containing 2-amino-2′-deoxyadenosine (dZ) instead of 2′-deoxyadenosine (dA) by making use of a novel polymerase.

[0001] The present invention relates to a novel family of DNA polymerases identified in bacteriophages (mainly from the family of Siphoviridae) which are able to accept 2-amino-2′-deoxyadenosine 5′-triphosphate (dZTP) as a substrate but which do not accept deoxyadenosine 5′-triphosphate (dATP) as a substrate. The present invention in particular relates to recombinant nucleic acid molecules, encoding such polymerases, vectors comprising such nucleic acid molecules, host cells transformed with such nucleic acid molecules or vectors as well as to methods for producing DNA molecules containing 2-amino-2′-deoxyadenosine (dZ) instead of 2′-deoxyadenosine (dA) by making use of a novel polymerase.

[0002] Biology is defined as the study of extant and extinct species that have appeared during evolution (Mayr Ernst, This Is Biology (Belknap Press, 1998); Woese et al., Proceedings of the National Academy of Sciences. 87, 4576-4579 (1990)). In all generality, it also encompasses the viable yet virtual species that remain to emerge by means of natural selection or rational construction (Wong, Front Biosci. 19, 1117 (2014); Marliere, Syst Synth Biol. 3, 77-84 (2009)). The task to design, assemble and evolve virtual organisms pertains to synthetic biology (Benner and Sismour, Nat Rev Genet. 6, 533-543 (2005)) and more pointedly to xenobiology (Schmidt, Bioessays. 32, 322-331 (2010)). In this respect, one focus in evolving virtual organisms is the development of genetic material which is different from that which normally occurs in nature.

[0003] Until now, no genetic polymer other than DNA and RNA has been found in any living organism (Pochet et al., C. R. Biol. 326, 1175-1184 (2003); Pinheiro et al., Science. 336, 341-344 (2012)). In its totality, RNA transcribed or replicated by any cellular or viral species is believed to originate from polymerization of the four canonical monomers rATP, rCTP, rGTP, rUTP. By contrast, the chemical structure of DNA precursors seems to have undergone a wider diversification (Warren, Annu. Rev. Microbiol. 34, 137-158 (1980)). Surrogates of dNTPs bearing an altered pyrimidine or purine heterocycle were found to replace each of the canonical dATP, dCTP, dGTP or dTTP during replication of certain DNA viruses infecting bacteria (Warren, Annu. Rev. Microbiol. 34, 137-158 (1980); Weigele and Raleigh, Chem. Rev. 116, 12655-12687 (2016)). No species is known to replicate by substituting more than one canonical dNTP. Cellular genomes consist of DNA resulting exclusively from polymerization of the four canonical dNTPs (Marliere et al., Angew. Chem. Int. Ed. Engl. 50, 7109-7114 (2011); Mehta et al., J. Am. Chem. Soc. 138, 14230-14233 (2016)).

[0004] One of the most extreme chemical deviation reached during the evolution of natural species consists of the complete replacement of adenine (A) by 2-aminoadenine (also known as 2,6-diaminopurine and herein also referred to as Z) in the DNA from the lytic phage S-2L, a siphovirus which preys on freshwater cyanobacteria of the genus Synechococcus (Khudyakov et al., Virology. 88, 8-18 (1978)). This phage, whose double-stranded linear DNA contains about 35% G, 35% C, 15% T and 15% of the base Z, was discovered in 1977 (Kirnos et al., Nature. 270, 369-370 (1977)). Like the G:C pair, the Z:T pair is stabilized by three hydrogen-bonds, instead of two in A:T (Bailly, Nucleic Acids Research. 26, 4309-4314 (1998)), thus singularly violating canonical Watson-Crick pairing.

[0005] Nevertheless, the presence of Z in templates does not preclude the incorporation of dTTP by DNA polymerases (Bailly et al., Proceedings of the National Academy of Sciences. 93, 13623-13628 (1996)) and, thus, Z-encoded genetic information can be retrieved under the form of A-containing, canonical DNA through replication. It was this faithful transliteration of Z into A during bacterial cloning procedures which made it possible to elucidate the 45 kbp genome sequence of the phage S-2L in 1998 (Weigele et al., Chem. Rev. 116, 12655-12687 (2016); WO2003093461).

[0006] The phage genome displayed a gene, designated purZ, for a protein distantly related to succinoadenylate synthase (EC 6.3.4.4) the cellular enzyme of adenine biosynthesis, encoded by purA (WO2003093461). This finding pointed to a possibly existing phage-encoded metabolic pathway converting guanine deoxynucleotides into dZTP (2-amino-2′-deoxyadenosine 5′-triphosphate) which may constitute a putative DNA polymerase substrate. However, so far no gene encoding a DNA polymerase could be detected in the S-2L genome when it was sequenced (Genbank AX955019.1).

[0007] The identification of a polymerase which would, e.g., be able to selectively incorporate 2-amino-2′-deoxyadenosine 5′-triphosphate instead of 2′-deoxyadenosine 5′-triphosphate (dATP) into DNA molecules would provide a useful tool for developing virtual organisms. Thus, there was a need to verify whether the occurrence of the nucleotide Z in the genome of the S-2L is indeed due to the selective incorporation of dZTP by a polymerase into a growing polynucleotide chain or is based on another mechanism, such as selective removal or degradation of dATP prior to replication which thus favors the presence and consequently the incorporation of dZTP into growing polynucleotide chains or the favored excision of incorporated dA by a 3′-exonuclease activity in comparison to the excision of dZ.

[0008] This need is addressed by the provision of the embodiments as characterized in the claims.

[0009] In particular, the present inventors were able to identify a new functional category of polymerases which are able of using 2-amino-2′-deoxyadenosine 5′-triphosphate (dZTP) as a substrate and of incorporating it into a polynucleotide molecule and which, at the same time reject dATP. Thus, such polymerases are able to discriminate, as regards the base, for 2-aminoadenine and against adenine.

[0010] Thus, in a first aspect, the present invention relates to a recombinant nucleic acid molecule comprising a nucleotide sequence encoding a polymerase wherein the polymerase is characterized by the following features:
[0011] (a) it has an amino acid sequence which is at least 50% identical to the amino acid sequence shown in any one of SEQ ID NOs: 1 to 233;
[0012] (b) it does not show 5′-exonuclease activity;
[0013] (c) it accepts 2-amino-2′-deoxyadenosine 5′-triphosphate (dZTP) as a substrate; and
[0014] (d) it does not accept deoxyadenosine 5′-triphosphate (dATP) as a substrate.

[0015] The feature of the newly identified class of polymerases to selectively accept 2-amino-2′-deoxyadenosine 5′-triphosphate (dZTP) as a substrate and to reject deoxyadenosine 5′-triphosphate (dATP) as a substrate, i.e. to discriminate between these two substrates and to only incorporate dZTP, is surprising and an extremely striking feature. This seems to be the first example of a polymerase which excludes a dNTP from incorporation during polynucleotide chain synthesis. Even though it was, e.g., found previously that bacteriophage T4 DNA polymerase can synthesize DNA containing 5hmdC fully substituting fordC in vivo, this polymerase does not discriminate between these two bases in vitro. Moreover, all commercially available polymerases are capable of utilizing a wide variety of non-canonical dNTPs in vitro. The highly selective utilization of 2-amino-2′-deoxyadenosine 5′-triphosphate (dZTP) as a substrate instead of deoxyadenosine 5′-triphosphate (dATP) as a substrate shown for the novel family of DNA polymerases described herein opens up interesting possibilities for biotechnological applications, some of which will be described herein below.

[0016] The polymerases of the present invention will also be referred to herein as “PolZ” or “DpoZ” and the respective genes encoding such polymerases will be referred to as “dpoZ”.

[0017] As described in the appended Examples, the present inventors used a rather unusual way for identifying the new class of polymerases which are derived from bacteriophages belonging to the Siphoviridae family (and other, preferably closely related, bacteriophage families). The viruses of this cluster infect cellular hosts as distant as Gram-negative proteobacteria (Vibrio, Salmonella and Acinetobacter), Gram-positive actinobacteria (Arthrobacter and Gordonia) and cyanobacteria (Synechococcus) and dwell habitats as diverse as soil, freshwater and seawater. In short, the inventors first looked for genes which may show homology to the purZ gene of the phage S-2L by remote homology searching. In the following, they analyzed the genomes of the organisms which were identified to contain such tentative purZ homologues for sequences which might encode polymerases. In a further step, it was attempted to find out whether any of such genes which may encode a polymerase co-evolved with the identified purZ homologues. It was surprisingly found that it was possible to identify a group of tentative polymerase encoding genes (homologous to polA for DNA polymerase I) which occur in synteny with the purZ homologues. The biochemical and enzymological characterization of four of these polymerases which only show a low degree of sequence identity to each other and which are derived from four different phages which are only distantly related and which infect microbes as different as Vibrio, Gordonia, Acinetobacter and Arthobacter revealed that all encode polymerases which belong to a novel functional category of DNA polymerases that discriminate for 2-aminoadenine and against adenine in the dNTP substrate and prefer templates containing dZ over templates containing dA. The presumptive novel polymerase gene from Siphoviruses was designated dpoZ, in accordance with Demerec's nomenclature (Demerec et al., Genetics 54 (1966), 61-67; see also https://jb.as.org/content/nomenclature).

[0018] The sequences shown in SEQ ID NOs: 112 to 120 represent exemplary DpoZ polymerases identified in:
[0019] Acinetobacter phage SH-Ab15497 (SEQ ID NO: 113);
[0020] Salmonella phage PMBT28 (SEQ ID NO: 114);
[0021] Vibrio phage phiVC8 (SEQ ID NO: 112);
[0022] Alteromonas phage ZP6 (SEQ ID NO: 117);
[0023] Streptomyces phage Hiyaa (SEQ ID NO: 120);
[0024] Gordonia phage Ghobes (SEQ ID NO: 116);
[0025] Arthrobacter phage Wayne (SEQ ID NO: 115);
[0026] Microbacterium phage Goodman (SEQ ID NO: 118);
[0027] Microbacterium phage Theresita (SEQ ID NO: 119).

[0028] FIG. 6 shows an alignment of these sequences. Among each other, these sequences show sequence identities from 30% to 60%. Further corresponding polymerase encoding genes could be found in other genomes of phages, predominantly of Siphoviridae phages, by further remote homology searches and phylogenetic analysis as regards the presence of a PurZ homologue in the corresponding phage genome, preferably in close proximity to the identified polymerase gene. “Close proximity” in particular means that the identified polymerase gene can be found in a distance of less than 20 genes, preferably of less than 18 genes, even more preferably of less than 17 genes and most preferably of less than 16 genes away from the PurZ homologue. The amino acid sequences of the corresponding DpoZ polymerases are shown in SEQ ID NOs: 1 to 111 and 121 to 233. When comparing the amino acid sequences of all the sequences shown in SEQ ID NOs: 1 to 233 it is evident that the sequences show identities of as low as about 30%. Nevertheless, as is shown in the appended Examples, despite the low degree of sequence identity, it could be shown that the corresponding polymerases nevertheless have the same functionality of being able to discriminate between dZ and dA as a substrate and preferring templates which contain dZ over templates which contain dA. Thus, it is evident that the novel class of DNA polymerases showing the same functionality of being able to discriminate between dZ and dA as a substrate and preferring templates which contain dZ over templates which contain dA only show a low degree of sequence identity. They share as a feature that they can be identified in genomes of phages, in particular in genomes of such phages which also contain a gene encoding a PurZ homologue, preferably in close proximity to the gene encoding the polymerase. Such phages preferably belong to the family of Siphoviridae or closely related virus families.

[0029] Thus, the polymerase as described in the present application is an enzyme which shows the features (a) to (d) as listed above, wherein the sequence identity to any one of SEQ ID NOs: 1 to 233 listed in feature (a) is at least 50%, preferably at least 55%, more preferably at least 60%, even more preferably at least 65%, particularly preferred at least 70%, 75%, 80%, 85%, 90%, 95%, 96%, 97%, 98% or 99%.

[0030] A structural analysis of the identified novel type of DNA polymerase revealed that it structurally corresponds to the Klenow fragment of E. coli PolA lacking the 5′-exonuclease domain but retaining the 3′-exonuclease domain (see FIGS. 1 and 7). However, the overall sequence identity of the newly identified class of dpoZ polymerases to the E. coli Klenow fragment is less than 30%.

[0031] The sequences shown in SEQ ID NOs: 112 to 120 which are structurally more closely analyzed and partly functionally analyzed in the appended Examples are merely representative examples of polymerases characterized by the features defined above which could be identified in the genomes of different types of Siphoviridae phages and closely related phage families. Further sequences encoding such polymerases have been identified in a large number of phages, predominantly Siphiroviridae phages, using the above outlined approach and are listed in Table 1 and in SEQ ID NOs: 1 to 111 and 121 to 233.

[0032] Further polymerases which show the above features (a) to (d) can be identified by applying the following steps:

[0033] Searching the genomic sequence of a phage, preferably a Siphiroviridae phage, for a nucleotide sequence which is a homolog of the purZ gene of the phage S-2L by remote homology searching. If such a purZ homolog is found in the genome of the phage, searching the genome of said phage for a gene which codes for a polymerase, preferably a gene which codes for a polymerase which shows at least 25% sequence identity to any one of SEQ ID Nos: 1 to 233. The fact that the genome of the respective phage comprises a purZ homolog is an indication that a polymerase gene which can be identified in such a phage is a polymerase which fulfills the features (b) to (d) as set forth above. Whether this is indeed the case can be verified by assays known to the person skilled in the art and as described in the further below. Generally, it is found that the purZ homolog found in a phage genome, preferably a Siphiroviridae genome, is located in close proximity to the polymerase gene, i.e. not more than 20 genes away, more preferably not more than 18, 17 or 16 genes away.

[0034] As mentioned above, the polymerase described herein has an amino acid sequence which is at least 50% identical to the amino acid sequence shown in any one of SEQ ID NOs: 1 to 233; preferably the polymerase has an amino acid sequence which is at least 50% identical to the amino acid sequence shown in any one of SEQ ID NOs: 1 to 207, even more preferably it has an amino acid sequence which is at least 50% identical to the amino acid sequence shown in any one of SEQ ID NOs: 112 to 120, particularly preferred it has an amino acid sequence which is at least 50% identical to the amino acid sequence shown in any one of SEQ ID NOs: 113 to 116.

[0035] The term “polymerase” as used in the scope of the present invention refers to a DNA polymerase. A DNA polymerase is characterized by the ability to polymerize a polynucleotide chain comprising deoxynucleotides from deoxynucleoside-triphosphates (dNTPs) using as a template a DNA molecule.

[0036] The DpoZ polymerases of the present application are characterized in that they do not show 5′-exonuclease activity. Whether a polymerase shows 5′-exonuclease activity or not can be verified by the skilled person by methods known in the art. One possibility is to analyze the amino acid sequence of the polymerase as regards structural similarities to known polymerase domains which convey 5′-exonuclease activity. If no such domains can be found in the polymerase in question, this indicates that the respective polymerase does not show 5′-exonuclease activity. Moreover, 5′-exonuclease activity can be tested for by applying standard assays. Such a standard assay is, e.g. described in Setlow and Kornberg (J. Biol. Chem. 247 (1972), 232-240).

[0037] The DpoZ polymerases of the present application are furthermore characterized in that they accept 2-amino-2′-deoxyadenosine 5′-triphosphate (dZTP) as a substrate. This means that a DpoZ polymerase of the present invention is able to use dZTP as a substrate during DNA replication and can incorporate it into a growing polynucleotide chain. This activity can be tested in assays known to the person skilled in the art (see, e.g., (Wynne et al., PLoS ONE. 8, e70892 (2013)) and as described in the appended Examples. For example, this activity can be tested by using a short stretch (e.g. around 24 nucleotides) of polydT as a template and wherein the template comprises at its 5′-end a short sequence (e.g. around 18 nucleotides long) to which a primer sequence can be hybridized which provides for a 3′-end serving as a starting point for the polymerase for polymerization. Advantageously, the primer sequence comprises a marker/tag which allows the detection of any possible elongation products which may result from an elongation by a polymerase, such as a fluorescent label. Such a template with hybridized primer can then be incubated with dZTP and with the polymerase to be tested for its ability to use dZTP as a substrate. After incubation the products of the reaction are analyzed for a possible elongation of the primer sequence based on the template and the incorporation of dZTP into a polynucleotide, e.g. by gel electrophoresis and detection of the marker/tag carried by the primer sequence.

[0038] In a preferred embodiment, the ability of a polymerase of the present invention to use dZTP as a substrate is tested according to a primer extension assay as described in the Materials and Methods section of the appended Examples. More specifically, such an assay is preferably designed as follows:

[0039] A reaction mix is prepared consisting of 100 μL volume containing 1 μM of the FAM-fluorescent-labeled 20-mer primer X1903 (shown in FIG. 3A (1) or (2); see Table 3 for the primer sequence), 3 μM of the 42-mer template comprising polydT (FIG. 3A (1) or (2)), 20 mM Tris-HCl (pH 7,5) buffer, 200 mM NaCl (or alternatively 50 mM NaCl), 1 mM DTT, 5 mM MgCl₂ and 1 mM dZTP. Primer:template duplexes are annealed by denaturation 2 min at 95° C., and cooled down to 4° C. (0.1° C./s). The polymerisation assay is started by adding 0.034 μM of DNA polymerase after 5 min of primer-template duplexes pre-heating at 37° C. Reactions are incubated at 37° C. for 30 min and 10 μL of reaction is mixed to 10 μL of quenching buffer (98% formamide, 10 mM EDTA). Extension products are separated by electrophoresis migration in denaturing polyacrylamide gels (7M, 1×TBE, 17% acrylamide gel). Gels are analyzed using the G-BOX (Ozyme) and band intensities are quantified with Genetools software (Syngene).

[0040] As a positive control, a polymerase which is known to accept dZTP as a substrate (e.g. any of the DpoZ polymerases as described in the present application or E. coli Klenow fragment) can be employed in a parallel assay. In order to assess in the gel electrophoresis analysis of the extension products whether an extension of the primer due to an incorporation of dZTP has occurred, the primer sequence and the expected full-length product are also analysed in parallel on the gel.

[0041] The polymerase is classified as being able to use dZTP as a substrate and to incorporate it into a growing polynucleotide chain if such an assay leads to a full-length extension product of the used template.

[0042] Such an assay can also be designed so as to quantify the percentage of primer molecules which has been extended to a full-length product. A preferable assay for carrying out the polymerisation experiments using different substrates (or templates) and subsequent quantification is an assay as described in Wynne et al. (PLOS ONE, 8 (2013), e70892; doi:10.1371/journal.pone.0070892). For example, such a quantification of the band intensities obtained in the gel can be done by using the Genetools software (Syngene).

[0043] If such a quantification is done, a polymerase is classified as being able to use dZTP as a substrate if at least 20%, more preferably at least 50%, even more at least 70% of the primer molecules are extended to a full-length product.

[0044] The DpoZ polymerases of the present application are furthermore characterized in that they do not accept deoxyadenosine 5′-triphosphate (dATP) as a substrate. In the context of the present invention the phrase “do not accept deoxyadenosine 5′-triphosphate (dATP) as a substrate” means that a dpoZ polymerase of the present invention is not able to use dATP as a substrate during DNA replication and cannot incorporate it into a growing polynucleotide chain or can only accept dATP as a substrate and incorporate it to a very low degree. This activity can be tested in assays known to the person skilled in the art (see, e.g., (Wynne et al., PLoS ONE. 8, e70892 (2013)) and as described in the appended Examples. For example, this activity can be tested by using a short stretch (e.g. around 24 nucleotides) of polydT as a template and wherein the template comprises at its 5′-end a short sequence (e.g. around 18 nucleotides long) to which a primer sequence can be hybridized which provides for a 3′-end serving as a starting point for the polymerase for polymerization. Advantageously, the primer sequence comprises a marker/tag which allows the detection of any possible elongation products which may result from an elongation by a polymerase, such as a fluorescent label. Such a template with hybridized primer can then be incubated with dATP and with the polymerase to be tested for its ability to use dATP as a substrate. After incubation the products of the reaction are analyzed for a possible elongation of the primer sequence based on the template and the incorporation of dATP into a polynucleotide, e.g. by gel electrophoresis and detection of the marker/tag carried by the primer sequence.

[0045] In a preferred embodiment, the ability of a polymerase of the present invention to use dATP as a substrate or the lack of such an ability is tested according to a primer extension assay as described in the Materials and Methods section of the appended Examples. More specifically, such an assay is preferably designed as follows:

[0046] A reaction mix is prepared consisting of 100 μL volume containing 1 μM of the FAM-fluorescent-labeled 20-mer primer X1903 (shown in FIG. 3A (1) or (2); for the primer sequence see Table 3), 3 μM of the 42-mer template comprising polydT (FIG. 3A (1) or (2)), 20 mM Tris-HCl (pH 7,5) buffer, 200 mM NaCl (or alternatively 50 mM NaCl), 1 mM DTT, 5 mM MgCl₂ and 1 mM dATP. Primer:template duplexes are annealed by denaturation 2 min at 95° C., and cooled down to 4° C. (0.1° C./s). The polymerisation assay is started by adding 0.034 μM of DNA polymerase after 5 min of primer-template duplexes pre-heating at 37° C. Reactions are incubated at 37° C. for 30 min and 10 μL of reaction is mixed to 10 μL of quenching buffer (98% formamide, 10 mM EDTA). Extension products are separated by electrophoresis migration in denaturing polyacrylamide gels (7M, 1×TBE, 17% acrylamide gel). Gels are analyzed using the G-BOX (Ozyme) and band intensities are quantified with Genetools software (Syngene).

[0047] As a positive control, a polymerase which is known to accept dATP as a substrate (e.g. E. coli Klenow fragment) can be employed in a parallel assay. In order to assess in the gel electrophoresis analysis of the extension products whether an extension of the primer due to an incorporation of dATP has occurred, the primer sequence and the expected full-length product are also analysed in parallel on the gel.

[0048] The polymerase is classified as not being able to use dATP as a substrate and to incorporate it into a growing polynucleotide chain if such an assay does not lead to a full-length extension product of the used template.

[0049] The feature that the DpoZ polymerases as described herein can accept dZTP as a substrate but cannot accept dATP as a substrate also means that, in a situation in which such a polymerase is used for the synthesis of a DNA strand based on a template DNA in the presence of both, dZTP and dATP, the polymerase selectively incorporates dZ into the produced polynucleotide chain but does not incorporate dA. Since a minor degree of acceptance of dATP by a DpoZ polymerase cannot completely be excluded, the term “selectively incorporates” means that the polymerase incorporates at more than 95% of dT residues in the template strand a dZ instead of a dA in the newly synthesized strand, even more preferably at more than 98% of dT residues in the template strand.

[0050] In a preferred embodiment, the DpoZ polymerases of the present invention are furthermore characterized in that they do not accept deoxyinosine 5′-triphosphate (dITP) as a substrate. In the context of the present invention the phrase “do not accept deoxyinosine 5′-triphosphate (dITP) as a substrate” means that a dpoZ polymerase of the present invention is not able to use dITP as a substrate during DNA replication and cannot incorporate it into a growing polynucleotide chain or can only accept dITP as a substrate and incorporate it to a very low degree. This activity can be tested in assays known to the person skilled in the art (see, e.g., (Wynne et al., PLoS ONE. 8, e70892 (2013)) and as described in the appended Examples. For example, this activity can be tested by using a short stretch (e.g. around 24 nucleotides) of polydC as a template and wherein the template comprises at its 5′-end a short sequence (e.g. around 18 nucleotides long) to which a primer sequence can be hybridized which provides for a 3′-end serving as a starting point for the polymerase for polymerization. Advantageously, the primer sequence comprises a marker/tag which allows the detection of any possible elongation products which may result from an elongation by a polymerase, such as a fluorescent label. Such a template with hybridized primer can then be incubated with dITP and with the polymerase to be tested for its ability to use dITP as a substrate. After incubation the products of the reaction are analyzed for a possible elongation of the primer sequence based on the template and the incorporation of dITP into a polynucleotide, e.g. by gel electrophoresis and detection of the marker/tag carried by the primer sequence.

[0051] In a preferred embodiment, the ability of a polymerase of the present invention to use dITP as a substrate or the lack of such an ability is tested according to a primer extension assay as described in the Materials and Methods section of the appended Examples. More specifically, such an assay is preferably designed as follows:

[0052] A reaction mix is prepared consisting of 100 μL volume containing 1 μM of the FAM-fluorescent-labeled 20-mer primer X1903 (shown in FIG. 8; for the primer sequence see Table 3), 3 μM of the 42-mer template comprising polydC (X1929; for the sequence see Table 3; FIG. 8), 20 mM Tris-HCl (pH 7,5) buffer, 200 mM NaCl (or alternatively 50 mM NaCl), 1 mM DTT, 5 mM MgCl₂ and 1 mM dITP. Primer:template duplexes are annealed by denaturation 2 min at 95° C., and cooled down to 4° C. (0.1° C./s). The polymerisation assay is started by adding 0.034 μM of DNA polymerase after 5 min of primer-template duplexes pre-heating at 37° C. Reactions are incubated at 37° C. for 30 min and 10 μL of reaction is mixed to 10 μL of quenching buffer (98% formamide, 10 mM EDTA). Extension products are separated by electrophoresis migration in denaturing polyacrylamide gels (7M, 1×TBE, 17% acrylamide gel). Gels are analyzed using the G-BOX (Ozyme) and band intensities are quantified with Genetools software (Syngene).

[0053] As a positive control, a polymerase which is known to accept dITP as a substrate (e.g. E. coli Klenow fragment) can be employed in a parallel assay. In order to assess in the gel electrophoresis analysis of the extension products whether an extension of the primer due to an incorporation of dITP has occurred, the primer sequence and the expected full-length product are also analysed in parallel on the gel.

[0054] The polymerase is classified as not being able to use dITP as a substrate and to incorporate it into a growing polynucleotide chain if such an assay does not lead to a full-length extension product of the used template.

[0055] The DpoZ polymerases of the present invention are characterized in that they accept dCTP, dGTP and dTTP as substrates. The ability to use any of these nucleotides as substrates can be assessed by primer extension assays as described above in which, however, a corresponding template (polydG for dCTP; polydC for dGTP and polydA for dTTP) is used and the corresponding nucleotide is added to the reaction mix.

[0056] In one embodiment of the present invention, the DpoZ polymerases of the present invention are furthermore characterized in that they show 3′-exonuclease activity. Whether a polymerase shows 3′-exonuclease activity or not can be verified by the skilled person by methods known in the art. One possibility is to analyze the amino acid sequence of the polymerase as regards structural similarities to known polymerase domains which convey 3′-exonuclease activity. If no such domains can be found in the polymerase in question, this indicates that the respective polymerase does not show 3′-exonuclease activity.

[0057] The DpoZ polymerases of the present invention are in particular characterized in that they show 3′-exonuclease activity on DNA single-strands. In a preferred embodiment, the DpoZ polymerases of the present application are furthermore characterized in that they show 3′-exonuclease activity on DNA double-strands. Whether a polymerase shows 3′-exonuclease activity on DNA single-strands or not or whether a polymerase shows 3′-exonuclease activity on DNA double-strands or not can be verified by the skilled person by methods known in the art. For example, 3′-exonuclease activity on DNA single-strands or DNA double-strands can be tested for by applying standard assays (see e.g. Derbyshire et al., EMBO J. 10 (1991), 17-24).

[0058] An example for an assay for assessing 3′-exonuclease activity is described in the Example section and the corresponding results are shown in FIGS. 4A and B. Thus, an assay for analyzing whether a given protein has 3′-exonuclease activity on a DNA single-strand can, e.g., be designed in such a manner that a 5′-labeled (e.g. fluorescent labeled) DNA single-strand is incubated (in the absence of dNTPS) with the respective polymerase to be tested for different time intervals (e.g. 5 minutes and 60 minutes) at an appropriate temperature (e.g. 37° C.). The used DNA single-strand preferably has the sequence as shown in FIG. 4A. The reaction products are then loaded onto a denaturing 17% polyacrylamide gel and separated by gel electrophoresis. As a positive control a reaction can be used employing a polymerase which is known to show 3′-exonuclease activity on DNA single-strands, such as the E. coli Klenow fragment. On the gel, a corresponding amount of the labeled untreated DNA single-strand is used as a control. If the gel analysis shows that after 60 minutes of incubation the amount of single-stranded DNA is reduced compared to the untreated single-stranded DNA (with a reduction meaning a reduction of at least 10%, preferably of at least 50%, even more preferably of at least 90%) this indicates 3′-exonuclease activity on DNA single-strands.

[0059] An assay for analyzing whether a given protein has 3′-exonuclease activity on a DNA double-strand can, e.g., be designed in such a manner that a 5′-labeled (e.g. fluorescent labeled) primer is annealed to an unlabeled template so as to create a partly double-stranded DNA molecule and the resulting duplex is incubated (in the absence of dNTPS) with the respective polymerase to be tested for different time intervals (e.g. 5 minutes and 60 minutes) at an appropriate temperature (e.g. 37° C.). The used primer and template strand preferably have the sequences as shown in FIG. 4B. The reaction products are then loaded onto a denaturing 17% polyacrylamide gel and separated by gel electrophoresis. As a positive control a reaction can be used employing a polymerase which is known to show 3′-exonuclease activity on DNA double-strands. On the gel, a corresponding amount of the untreated labeled primer is used as a control. In case the polymerase shows no 3′-exonuclease activity on the annealed duplex, a band corresponding in length and strength to the untreated labeled primer is seen. In case the polymerase shows 3′-exonuclease activity on the annealed duplex, the band corresponding in length to the untreated labeled primer shows a reduced intensity and, preferably, distinct bands with shorter length can be observed. If the gel analysis shows that after 60 minutes of incubation the amount of the signal corresponding to the untreated labeled primer is reduced compared to the untreated labeled primer (with a reduction meaning a reduction of at least 20%, preferably of at least 30%, even more preferably of at least 50%) this indicates 3′-exonuclease activity on DNA double-strands. Moreover, the occurrence of bands with a shorter length than the untreated labeled primer also is an indication for 3′-exonuclease activity on DNA double-strands.

[0060] In another embodiment of the present invention, the DpoZ polymerases of the present application are furthermore characterized in that they do not show 3′-exonuclease activity.

[0061] In this embodiment the DpoZ polymerases of the present invention are in particular characterized in that they do not show 3′-exonuclease activity on DNA single-strands. In a further preferred embodiment, the DpoZ polymerases of the present application are furthermore characterized in that they do not show 3′-exonuclease activity on DNA double-strands. Whether a polymerase shows 3′-exonuclease activity on DNA single-strands or not or whether a polymerase shows 3′-exonuclease activity on DNA double-strands or not can be verified by the skilled person by methods known in the art and as described above.

[0062] Thus, an example for an assay for assessing 3′-exonuclease activity is described in the Example section and the corresponding results are shown in FIGS. 4A and B. Thus, an assay for analyzing whether a given protein has 3′-exonuclease activity on a DNA single-strand or not can, e.g., be designed in such a manner that a 5′-labeled (e.g. fluorescent labeled) DNA single-strand is incubated (in the absence of dNTPS) with the respective polymerase to be tested for different time intervals (e.g. 5 minutes and 60 minutes) at an appropriate temperature (e.g. 37° C.). The used DNA single-strand preferably has the sequence as shown in FIG. 4A. The reaction products are then loaded onto a denaturing 17% polyacrylamide gel and separated by gel electrophoresis. As a positive control a reaction can be used employing a polymerase which is known to show 3′-exonuclease activity on DNA single-strands, such as the E. coli Klenow fragment. On the gel, a corresponding amount of the labeled untreated DNA single-strand is used as a control. If the gel analysis shows that after 60 minutes of incubation the amount of single-stranded DNA is not reduced compared to the untreated single-stranded DNA (“not reduced” meaning in this context a reduction of less than 10%, preferably of less than 8%, even more preferably of at least 5%) this indicates that the respective polymerase does not have 3′-exonuclease activity on DNA single-strands.

[0063] An assay for analyzing whether a given protein has 3′-exonuclease activity on a DNA double-strand or not can, e.g., be designed in such a manner that a 5′-labeled (e.g. fluorescent labeled) primer is annealed to an unlabeled template so as to create a partly double-stranded DNA molecule and the resulting duplex is incubated (in the absence of dNTPS) with the respective polymerase to be tested for different time intervals (e.g. 5 minutes and 60 minutes) at an appropriate temperature (e.g. 37° C.). The used primer and template strand preferably have the sequences as shown in FIG. 4B. The reaction products are then loaded onto a denaturing 17% polyacrylamide gel and separated by gel electrophoresis. As a positive control a reaction can be used employing a polymerase which is known to show 3′-exonuclease activity on DNA double-strands. On the gel, a corresponding amount of the untreated labeled primer is used as a control. In case the polymerase shows no or a reduced 3′-exonuclease activity on the annealed duplex, a band corresponding in length and strength to the untreated labeled primer is seen. If the gel analysis shows that after 60 minutes of incubation the amount of the signal corresponding to the untreated labeled primer is not reduced compared to the untreated labeled primer (“not reduced” meaning in this context a reduction of less than 10%, preferably of less than 8%, even more preferably of at least 5%) this indicates that there is no 3′-exonuclease activity on DNA double-strands.

[0064] As is illustrated in the appended Examples, the naturally occurring DpoZ polymerases of the present invention show 3′-exonuclease activity. However, for practical applications, i.e. the mass production of nucleic acids, such as plasmids, it may be advantageous to provide variants of such polymerases which do no longer show 3′-exonuclease activity. As shown in the appended Examples, the polymerases of the present invention are structurally related to the Klenow fragment of the E. coli polymerase and, accordingly, also show a domain which is structurally related to the domain of the Klenow fragment which conveys the 3′-exonuclease activity. As also shown in the appended Examples, it is possible to prepare variants of a naturally DpoZ polymerase (which can be identified in phage genomes) which do no longer show 3′-exonuclease activity. This can be achieved by effecting in the amino acid sequence of the DpoZ polymerase a substitution at a position which corresponds to position 424 of E. coli DNA pol 1. As shown in FIG. 1, the amino acid sequences of DpoZ polymerases can easily be aligned with the amino acid sequence of E. coli pol I (encoded by the polA gene). The amino acid “D” at position 424 of the amino acid sequence of the E. coli pol I enzyme lies within the domain which is responsible for 3′-exonuclease activity of the E. coli enzyme and is strongly conserved among the DpoZ enzymes analyzed so far (see FIG. 7). A substitution of “D” to “A” in either the E. coli Klenow fragment or in any of the DpoZ polymerases analyzed in the appended Examples leads to a loss of 3′-exonuclease activity.

[0065] Thus, in one preferred embodiment the DpoZ polymerase according to the present invention is a polymerase as defined above which does not have 3′-exonuclease activity and which is characterized in that it contains in its amino acid sequence a substitution in comparison to the wildtype sequence from which it is derived at the position which corresponds to position D424 of the E. coli pol 1. In a preferred embodiment, the substitution is a substitution by an alanine (A). In other preferred embodiments the DpoZ polymerase according to the present invention is a polymerase as defined above which does not have 3′-exonuclease activity and which is characterized in that it contains in its amino acid sequence a substitution in comparison to the wildtype sequence from which it is derived at the position which corresponds to position D355 or D501 of the E. coli pol 1. In a preferred embodiment, the substitution is a substitution by an alanine (A). It is known, e.g. from Derbyshire et al. (EMBO J. 10 (1991), 17-24) that these positions (as position D424) are essential for 3′-exonuclease activity.

[0066] The present invention also relates to a DpoZ polymerase encoded by a nucleic acid molecule of the present invention, wherein said DpoZ polymerase does not have 3′-exonuclease activity, preferably by a DpoZ polymerase which shows a substitution as described above.

[0067] A polymerase of the present invention is characterized in that it is able to use as a template a DNA molecule which contains dZ nucleotides instead of dA nucleotides. This ability can be tested in a primer extension assay as described above in which, however, a template is used which contains only dZ nucleotides or a template which comprises a random sequence and which contains dZ nucleotides instead of dA nucleotides. The occurrence of a full-length elongation product in such a primer-extension assay is indicative of the ability of the polymerase to use a template which comprises dZ instead of dA for DNA synthesis. A corresponding assay is also described in the Example section and is illustrated in FIGS. 3 and 5.

[0068] In one preferred embodiment, a polymerase of the present invention is characterized in that it is able to use as a template a DNA molecule which contains dZ nucleotides instead of dA nucleotides and it is also able to use as a template a DNA molecule which contains dA nucleotides. The ability of a polymerase to use as a template a DNA molecule which contains dA nucleotides can be tested in a primer extension assay as described above in which, however, a template is used which contains only dA nucleotides or a template which comprises a random sequence and which contains dA nucleotides (but no dZ nucleotides). The occurrence of a full-length elongation product in such a primer-extension assay is indicative of the ability of the polymerase to use a template which comprises A for DNA synthesis. A corresponding assay is described in the Example section and is illustrated in FIGS. 3 and 5. It is shown in the Examples (see FIGS. 3 and 5) that, e.g., the DpoZ polymerase of Vibrio phage phiVC8 (SEQ ID NO: 112) and that of Acinetobacter phage SH-Ab15497 (SEQ ID NO: 113) can use a template containing either Z or A deoxynucleotides.

[0069] In another preferred embodiment, a polymerase of the present invention is characterized in that it is able to use as a template a DNA molecule which contains dZ nucleotides instead of dA nucleotides, but it is not able to use as a template a DNA molecule which contains dA nucleotides. The ability of a polymerase to use as a template a DNA molecule which contains dA nucleotides can be tested in a primer extension assay as described above in which, however, a template is used which contains only dA nucleotides or a template which comprises a random sequence and which contains dA nucleotides (but no dZ nucleotides). If no full-length elongation products can be detected in such a primer-extension assay, this is indicative of the inability of the polymerase to use a template which comprises dA for DNA synthesis. A corresponding assay is described in the Example section and is illustrated in FIGS. 3 and 5.

[0070] It is shown in the Examples (see FIGS. 3 and 5) that, e.g., the DpoZ polymerase of Gordonia phage Ghobes (SEQ ID NO: 117) and that of Arthrobacter phage Wayne (SEQ ID NO: 116) can use a template containing dZ nucleotides but cannot use a template containing dA nucleotides.

[0071] As described above and as evident from FIGS. 1 and 7, the DpoZ polymerases of the present invention are structurally related to the E. coli pol I enzyme. However, there are also characteristic structural differences to the E. coli pol I enzyme. For example, a DpoZ polymerase as described herein is preferably characterized in that it does not show in its amino acid sequence a tyrosine residue at a position which corresponds to position Y766 of the E. coli pol I enzyme (SEQ ID NO: 234) but shows a different amino acid at this position, preferably a phenylalanine residue.

[0072] The term “recombinant nucleic acid molecule which comprises a nucleotide sequence encoding a polymerase” refers to a nucleic acid molecule which comprises a nucleotide sequence encoding a polymerase as described above and at least one nucleotide sequence which does not naturally occur in direct physical connection with such a nucleotide sequence encoding said polymerase. Thus, the term “recombinant nucleic acid molecule which comprises a nucleotide sequence encoding a polymerase” excludes a naturally occurring phage genome comprising a nucleotide sequence encoding a polymerase as defined above. In a preferred embodiment, the recombinant nucleic acid molecule comprises a nucleotide sequence encoding a polymerase as described above which is operatively linked to a heterologous promoter which allows for its expression in prokaryotic or eukaryotic cells. The term “heterologous” means that the promoter which is operatively linked to the nucleotide sequence which encodes the polymerase is different from the natural promoter which naturally is located in front of the sequence encoding the polymerase and which drives the expression of the gene in the phage genome.

[0073] The term “operatively linked” or “operably linked” as used herein refers to a linkage between one or more expression control sequences, like a promoter, and the coding region in the polynucleotide to be expressed in such a way that expression is achieved under conditions compatible with the expression control sequence. Expression comprises transcription of the respective nucleotide sequence, preferably into a translatable mRNA. Regulatory elements ensuring expression in as in prokaryotes, such as bacteria, and eukaryotes, such as fungal, animal and plant cells, are well known to those skilled in the art. They encompass promoters, enhancers, termination signals, targeting signals and the like. Examples are given further below in connection with explanations concerning vectors.

[0074] Promoters for use in connection with the nucleic acid molecule may be homologous or heterologous with regard to the gene to be expressed and/or the cell in which they are intended to be employed. Suitable promoters are for instance promoters which lend themselves to constitutive expression. However, promoters which are only activated at a point in time determined by external influences can also be used. Artificial and/or chemically inducible promoters may be used in this context.

[0075] The recombinant nucleic acid molecule can further comprise expression control sequences operably linked to said nucleotide sequence encoding a polymerase. These expression control sequences may be suited to ensure transcription and synthesis of a translatable RNA in bacteria or fungi.

[0076] In addition, it is possible to insert different mutations into the polynucleotides by methods usual in molecular biology (see for instance Sambrook and Russell (2001), Molecular Cloning: A Laboratory Manual, CSH Press, Cold Spring Harbor, NY, USA), leading to the synthesis of polypeptides possibly having modified biological properties. The introduction of point mutations is conceivable at positions at which a modification of the amino acid sequence for instance influences the biological activity or the regulation of the polypeptide.

[0077] It is, e.g., described in the Example section how mutants of the described polymerases can be produced which show no or a strongly reduced 3′-exonuclease activity.

[0078] Moreover, mutants possessing a modified substrate or product specificity can be prepared.

[0079] Preferably, such mutants show an increased activity. Alternatively, mutants can be prepared the catalytic activity of which is abolished without losing substrate binding activity.

[0080] Furthermore, the introduction of mutations into the polynucleotides encoding an polymerase as defined above allows the gene expression rate and/or the activity of the enzymes encoded by said polynucleotides to be reduced or increased.

[0081] For genetically modifying bacteria or fungi, the polynucleotides encoding an enzyme as defined above or parts of these molecules can be introduced into plasmids which permit mutagenesis or sequence modification by recombination of DNA sequences. Standard methods (see Sambrook and Russell (2001), Molecular Cloning: A Laboratory Manual, CSH Press, Cold Spring Harbor, NY, USA) allow base exchanges to be performed or natural or synthetic sequences to be added. DNA fragments can be connected to each other by applying adapters and linkers to the fragments. Moreover, engineering measures which provide suitable restriction sites or remove surplus DNA or restriction sites can be used. In those cases, in which insertions, deletions or substitutions are possible, in vitro mutagenesis, “primer repair”, restriction or ligation can be used. In general, a sequence analysis, restriction analysis and other methods of biochemistry and molecular biology are carried out as analysis methods. The polynucleotide encoding the polymerase can be expressed so as to lead to the production of a polypeptide having the activities described above. An overview of different expression systems is for instance contained in Methods in Enzymology 153 (1987), 385-516, in Bitter et al. (Methods in Enzymology 153 (1987), 516-544) and in Sawers et al. (Applied Microbiology and Biotechnology 46 (1996), 1-9), Billman-Jacobe (Current Opinion in Biotechnology 7 (1996), 500-4), Hockney (Trends in Biotechnology 12 (1994), 456-463), Griffiths et al., (Methods in Molecular Biology 75 (1997), 427-440). An overview of yeast expression systems is for instance given by Hensing et al. (Antonie van Leuwenhoek 67 (1995), 261-279), Bussineau et al. (Developments in Biological Standardization 83 (1994), 13-19), Gellissen et al. (Antonie van Leuwenhoek 62 (1992), 79-93, Fleer (Current Opinion in Biotechnology 3 (1992), 486-496), Vedvick (Current Opinion in Biotechnology 2 (1991), 742-745) and Buckholz (Bio/Technology 9 (1991), 1067-1072).

[0082] The present invention also relates to a vector, such as a plasmid, comprising the recombinant nucleic acid molecule as described above. One example of a vector is construct which allows for the introduction into a desired host cell and the presence of the recombinant nucleic acid molecule in the host cell either in extrachromosomal form (e.g., in the form of a replicating plasmid) or integrated into the host cell's genome. Such a construct may also be designed as an expression vector which contains regulatory elements which allow for the expression of the nucleotide sequence encoding the polymerase in the desired host cell. Expression vectors have been widely described in the literature. As a rule, they contain not only a selection marker gene and a replication-origin ensuring replication in the host selected, but also a bacterial or viral promoter, and in most cases a termination signal for transcription. Between the promoter and the termination signal there is in general at least one restriction site or a polylinker which enables the insertion of a coding DNA sequence. It is possible to use promoters ensuring constitutive expression of the gene and inducible promoters which permit a deliberate control of the expression of the gene. Bacterial and viral promoter sequences possessing these properties are described in detail in the literature. Regulatory sequences for the expression in microorganisms (for instance E. coli, S. cerevisiae) are sufficiently described in the literature. Promoters permitting a particularly high expression of a downstream sequence are for instance the T7 promoter (Studier et al., Methods in Enzymology 185 (1990), 60-89), lacUV5, trp, trp-lacUV5 (DeBoer et al., in Rodriguez and Chamberlin (Eds), Promoters, Structure and Function; Praeger, New York, (1982), 462-481; DeBoer et al., Proc. Natl. Acad. Sci. USA (1983), 21-25), Ip1, rac (Boros et al., Gene 42 (1986), 97-100). Inducible promoters are preferably used for the synthesis of polypeptides. These promoters often lead to higher polypeptide yields than do constitutive promoters. In order to obtain an optimum amount of polypeptide, a two-stage process is often used. First, the host cells are cultured under optimum conditions up to a relatively high cell density. In the second step, transcription is induced depending on the type of promoter used. In this regard, a tac promoter is particularly suitable which can be induced by lactose or IPTG (=isopropyl-β-D-thiogalactopyranoside) (deBoer et al., Proc. Natl. Acad. Sci. USA 80 (1983), 21-25). Termination signals for transcription are also described in the literature.

[0083] The present invention also relates to a recombinant host cell comprising a recombinant nucleic acid molecule of the present invention or being transformed with a nucleotide sequence encoding a polymerase as defined above. The term “recombinant” in this context means that the host cell has been genetically modified by the introduction of the recombinant nucleic acid molecule of the present invention or by a nucleotide sequence encoding a polymerase as defined above. Thus, the recombinant host cell is characterized by the fact that it naturally does not contain a nucleotide sequence encoding a polymerase as defined herein above. In a preferred embodiment, the nucleotide sequence encoding a polymerase which is used to transform the host cell or which is contained in the recombinant nucleic acid molecule which is introduced into the host cell is recombinant in the sense that comprises a nucleotide sequence encoding a polymerase as described above which is operatively linked to a heterologous promoter which allows for its expression in said host cell. The term “heterologous” means that the promoter which is operatively linked to the nucleotide sequence which encodes the polymerase is different from the natural promoter which is located in front of the sequence encoding the polymerase and naturally drives the expression of the gene in the phage genome.

[0084] The host cell may be any possible cell, such as a microorganism or an animal or plant cell. The term “microorganism” in the context of the present invention refers to bacteria, as well as to fungi, such as yeasts, and also to algae and archaea. In one preferred embodiment, the microorganism is a bacterium. In principle any bacterium can be used as a host cell. Preferred bacteria are bacteria of the genus Bacillus, Clostridium, Corynebacterium, Pseudomonas, Zymomonas or Escherichia. In a particularly preferred embodiment the bacterium belongs to the genus Escherichia and even more preferred to the species Escherichia coli. In another preferred embodiment the bacterium belongs to the species Pseudomonas putida or to the species Zymomonas mobilis or to the species Corynebacterium glutamicum or to the species Bacillus subtilis.

[0085] The host cell may also be an extremophilic bacterium such as Thermus thermophilus, or anaerobic bacteria from the family Clostridiae.

[0086] In another preferred embodiment the microorganism is a fungus, more preferably a fungus of the genus Saccharomyces, Schizosaccharomyces, Aspergillus, Trichoderma, Kluyveromyces or Pichia and even more preferably of the species Saccharomyces cerevisiae, Schizosaccharomyces pombe, Aspergillus niger, Trichoderma reesei, Kluyveromyces marxianus, Kluyveromyces lactis, Pichia pastoris, Pichia torula or Pichia utilis.

[0087] In another embodiment, the host cell is a photosynthetic microorganism expressing at least one enzyme for the conversion according to the invention as described above. Preferably, the microorganism is a photosynthetic bacterium, or a microalgae. In a further embodiment the microorganism is an algae, more preferably an algae belonging to the diatomeae.

[0088] In one preferred embodiment the host cell is a host cell which is able to synthesize dZTP. If a cell is not naturally able to synthesize dZTP this ability can be conferred to the cell by providing it with nucleic acid molecules which encode enzymes which confer this ability. As described above, the phage S-2L displays in its genome a gene, designated purZ, coding for a protein distantly related to succinoadenylate synthase (EC 6.3.4.4) the cellular enzyme of adenine biosynthesis, encoded by purA. It has been found that the protein encoded by this purZ gene is able to react aspartate with deoxyguanylate into dSMP (N6-succino-2-amino-2′-deoxyadenylate). Since these substrates naturally occur in basically every cellular organism, a host cell can be equipped with the ability to synthesize dSMP by introducing into such a host cell a nucleic acid molecule which encodes a PurZ protein and expressing it. Nucleic acid sequences which encode a purZ protein are known from the genome of the phage (i.e. the nucleotide sequence which encodes a protein which is related to PurA.

[0089] The dSMP which is synthesized by the PurZ protein can then be further converted into dZTP by enzymes which usually occur in cellular organisms. For example, the dSMP can be further converted in to dZMP by lyase, such as an adenylosuccinate lyase (EC 4.3.2.2), which is encoded by the purB gene. Corresponding enzymes and encoding nucleic acid molecules are known from various organisms, such as E. coli or bacteria of the genus Vibrio, e.g. Vibrio cholerae. The thus produced dZMP can then be further converted into dZTP by kinases, e.g. by a guanylate kinase (EC 2.7.4.8; encoded by the gmk gene) and a nucleoside diphosphate kinase (EC 2.7.4.6; encoded by the ndk gene).

[0090] Thus, the present invention also relates to a host cell which expresses a DpoZ polymerase as described herein above and which is furthermore capable of converting dZ into dZTP, preferably due to the expression of an adenylosuccinate lyase (EC 4.3.2.2), a guanylate kinase (EC 2.7.4.8) and a nucleoside diphosphate kinase (EC 2.7.4.6).

[0091] In another preferred embodiment the host cell is capable of importing dZTP from the exterior into the cell. This can, e.g., be achieved by genetically modifying the host cell so as to express a dNTP transporter as, e.g. described in Pezo et al. (ACS Synth. Biol.; DOI: 10.1021/acssynbio.8b00048).

[0092] The transformation of the host cell with a recombinant nucleic acid molecule or a vector as described above can be carried out by standard methods, as for instance described in Sambrook and Russell (2001), Molecular Cloning: A Laboratory Manual, CSH Press, Cold Spring Harbor, NY, USA; Methods in Yeast Genetics, A Laboratory Course Manual, Cold Spring Harbor Laboratory Press, 1990. The host cell is cultured in nutrient media meeting the requirements of the particular host cell used, in particular in respect of the pH value, temperature, salt concentration, aeration, antibiotics, vitamins, trace elements etc.

[0093] Furthermore, the present invention relates to a method for the production of a DNA molecule comprising 2-amino-2′-deoxyadenosine (dZ) instead of deoxyadenosine (dA) comprising the steps of:
[0094] (i) Providing a template DNA molecule to be replicated;
[0095] (ii) Providing dNTPs and wherein said dNTPs include 2-amino-2′-deoxyadenosine-triphosphate (dZTP);
[0096] (iii) Providing a polymerase as described herein above; and
[0097] (iv) Incubating the components of (i) to (iii).

[0098] As described above, the DpoZ polymerases described herein allow to produce DNA molecules which comprise 2-amino-2′-deoxyadenosine (dZ) instead of deoxyadenosine (dA). Since the described DpoZ polymerases do not accept dATP as a substrate, DNA molecules which are produced by a DpoZ polymerase as described in the present invention comprise dZ nucleotides instead of dA nucleotides. Thus, even in the presence of dATP and dZTP at the same time, the DpoZ polymerases will selectively incorporate dZ into a growing nucleotide chain instead of dA.

[0099] The method for the production of a DNA molecule may be carried out in vitro or in vivo.

[0100] For carrying out the method in vitro, the different components mentioned in (i) to (iii) are provided in a reaction vessel (e.g. an Eppendorf tube or the well of a 96-well plate) in a suitable reaction medium (appropriate buffer etc., e.g. as described in the Example section).

[0101] The template DNA molecule to be replicated can be any suitable DNA molecule. Such a DNA molecule is provided in a form which allows for the polymerase to act on it. For example, the template can be provided in the form of a single stranded DNA molecule to which a primer molecule is annealed which provides for a 3′-end to which the polymerase can attach nucleotides thereby synthesizing a polynucleotide. In principle, the template can be furnished in any suitable form which provides for a template strand to be replicated and a partly double-stranded region with a free 3′-end as a starting point for DNA synthesis for the polymerase. Suitable forms are known to the person skilled in the art.

[0102] The dNTPs provided as component (ii) include dZTP. The dNTPs also include other dNTPs which are necessary for the synthesis of the DNA molecule. Typically, these are the naturally occurring dNTPs dTTP, dCTP and dGTP. However, these may be substituted by modified versions of these dNTPs in as far as the DpoZ polymerase employed in the method is able to accept such modified dNTPs as substrates and to incorporate them into a polynucleotide chain. Moreover, it is also possible to include in such a reaction dATP in case it is intended to benefit in such a method from the ability of the polymerase to selectively incorporate into the produced DNA molecule dZ instead of dA, e.g. for selection purposes or the like.

[0103] For an in vitro method, the polymerase in component (iii) can be provided in any suitable form to the reaction mixture. Preferably, the polymerase is provided as a purified enzyme.

[0104] In case of an in vitro method, the incubation of step (iv) of the method according to the present invention is carried out under appropriate conditions which allow for the polymerase to be active. Corresponding conditions can be determined by the skilled person by routine experiments. Exemplary conditions are described in the appended Examples and can be varied or optimized for a particular polymerase by the skilled person according to routine measures.

[0105] The method according to the present invention for the production of a DNA molecule comprising 2-amino-2′-deoxyadenosine (dZ) instead of deoxyadenosine (dA) can also be carried out in vivo. For this, the provision of the DNA template can be achieved by making sure that the DNA molecule to be replicated is in the cell used for the method and can be accessed by the polymerase.

[0106] If the method is carried out in vivo, the dZTP may be provided by the cells themselves or it may be provided externally. Thus, in the former case, the step of providing 2-amino-2′-deoxyadenosine-triphosphate (dZTP) is achieved by having dZTP synthesized by the cells. This may be accomplished by providing dZ in the culture medium and by making sure that the cells which are used in the method have the ability to convert dZ into dZTP. How this can be achieved is described above. In the latter case, i.e. the provision of dZTP externally, the dZTP can be imported into the cells with the help of a dNTP transporter (see, e.g., Pezo et al. (ACS Synth. Biol.; DOI: 10.1021/acssynbio.8b00048).

[0107] The remaining dNTPs are normally provided by the cells themselves. Typically, these are the naturally occurring dNTPs dTTP, dATP, dCTP and dGTP. However, these may be substituted by modified versions of these dNTPs in as far as the DpoZ polymerase employed in the method is able to accept such modified dNTPs as substrates and to incorporate them into a polynucleotide chain. Such modified dNTPs can either be synthesized by the cells themselves or they can be provided externally and can be imported into the cells, e.g. with the help of a dNTP transporter (see, e.g., Pezo et al. (ACS Synth. Biol.; DOI: 10.1021/acssynbio.8b00048). When the method according to the present invention is carried out in vitro, the provision of the polymerase in step (iii) is normally achieved by having the polymerase expressed by the cells which are employed in the method. Such cells are normally host cells according to the present invention into which a nucleotide sequence encoding the corresponding polymerase has been introduced and which are therefore genetically modified. The nucleotide sequence encoding the polymerase is generally linked to an expression control region (including a promoter, preferably a heterologous promoter) which allows for expression of the polymerase in the cells.

[0108] If the method is carried out in vivo, the incubation step (iv) includes the culturing of the cells which are used for the method. Such culturing could, e.g., be a small-scale culturing on a laboratory scale in corresponding flasks or on culture plates, or it can be large-scale fermentation in a bioreactor.

[0109] In one embodiment of the method of the present invention, preferably in a case in which the method is carried out in vitro, the template DNA molecule comprises dZ nucleotides instead of dA nucleotides.

[0110] The method of method of the present invention for the production of a DNA molecule comprising 2-amino-2′-deoxyadenosine (dZ) instead of deoxyadenosine (dA) may furthermore comprise the step of recovering the produced DNA molecule comprising 2-amino-2′-deoxyadenosine (dZ).

[0111] The present invention also relates to the use of a DpoZ polymerase as described herein-above for the production of a DNA molecule comprising 2-amino-2′-deoxyadenosine (dZ) instead of deoxyadenosine (dA). In particular, the present invention relates to such a use in which the production of the DNA molecule is performed in the presence of dZTP and dATP.

[0112] Moreover, the present invention relates to a composition comprising a recombinant nucleic acid molecule encoding a DpoZ polymerase as described herein-above, a vector as described above or a host cell as described above and dZTP (and optionally further dNTPS like dTTP, dGTP and dCTP) as well as to a composition comprising a DpoZ polymerase as described herein-above and dZTP (and optionally further dNTPS like dTTP, dGTP and dCTP). Such a composition may optionally also comprise dATP.

[0113] The present invention also relates to a kit comprising (in separate compartments) a recombinant nucleic acid molecule encoding a DpoZ polymerase as described herein-above, a vector as described above or a host cell as described above and dZTP (and optionally further dNTPS like dTTP, dGTP and dCTP) as well as to a kit comprising (in separate compartments) a DpoZ polymerase as described herein-above and dZTP (and optionally further dNTPS like dTTP, dGTP and dCTP). Such a kit may optionally also comprise dATP.

[0114] Thus, in summary, the present invention, in particular, relates to the following items.
[0115] 1. A recombinant nucleic acid molecule comprising a nucleotide sequence encoding a polymerase wherein the polymerase is characterized by the following features:
   [0116] (a) it has an amino acid sequence which is at least 50% identical to the amino acid sequence shown in any one of SEQ ID NOs: 1 to 233;
   [0117] (b) it does not show 5′-exonuclease activity;
   [0118] (c) it accepts 2-amino-2′-deoxyadenosine 5′-triphosphate (dZTP) as a substrate; and
   [0119] (d) it does not accept deoxyadenosine 5′-triphosphate (dATP) as a substrate.
[0120] 2. The recombinant nucleic acid molecule of item 1, wherein the polymerase is furthermore characterized by the feature that it shows 3′-exonuclease activity.
[0121] 3. The recombinant nucleic acid molecule of item 1, wherein the polymerase is furthermore characterized by the feature that it does not show 3′-exonuclease activity.
[0122] 4. The recombinant nucleic acid molecule of any one of items 1 to 3, wherein the nucleotide sequence encoding the polymerase is operatively linked to a heterologous promoter sequence.
[0123] 5. A vector comprising the recombinant nucleic acid molecule of any one of items 1 to 4.
[0124] 6. A host cell comprising the recombinant nucleic acid molecule of any one of items 1 to 4 or the vector of claim 5.
[0125] 7. A method for the production of a DNA molecule comprising 2-amino-2′-deoxyadenosine (dZ) instead of deoxyadenosine (dA) comprising the steps of:
   [0126] (i) Providing a template DNA molecule to be replicated;
   [0127] (ii) Providing dNTPs and wherein said dNTPs include 2-amino-2′-deoxyadenosine-triphosphate (dZTP);
   [0128] (iii) Providing a polymerase as defined in any one of claims 1 to 3; and
   [0129] (iv) Incubating the components of (i) to (iii).
[0130] 8. The method of item 7, which furthermore comprises the step of recovering the produced DNA molecule comprising 2-amino-2′-deoxyadenosine (dZ).
[0131] 9. The method of item 7 or 8 which is carried out in vitro.
[0132] 10. The method of item 7 or 8 which is carried out in vivo.
[0133] 11. Use of a polymerase as defined in any one of items 1 to 3 for the production of a DNA molecule comprising 2-amino-2′-deoxyadenosine (dZ) instead of deoxyadenosine (dA).
[0134] 12. A composition comprising a recombinant nucleic acid molecule of any one of claims 1 to 4, a polymerase as defined in any one of items 1 to 3, a vector of item 5 or a host cell of item 6 and dZTP (and optionally further dNTPS like dTTP, dGTP and dCTP).
[0135] 13. A kit comprising a recombinant nucleic acid molecule of any one of items 1 to 4, a polymerase as defined in any one of items 1 to 3, a vector of item 5 or a host cell of item 6 and dZTP (and optionally further dNTPS like dTTP, dGTP and dCTP)
[0136] 14. A polymerase encoded by the nucleic acid molecule of item 3.
[0137] 15. The polymerase of item 14 characterized in that it contains in its amino acid sequence a substitution at the position which corresponds to position D424 of the amino acid sequence of E. coli pol I (SEQ ID NO: 234), preferably a substitution by alanine.

### FIGURE LEGENDS

[0138] FIG. 1: Multiple sequence alignment of DNA polymerases from E. coli (PolA; SEQ ID NO: 234) and Siphoviridae bacteriophages (DpoZ) obtained with the software MUSCLE (default parameter values).
[0139] E. coli Pol I (SEQ ID NO: 234)
[0140] Acinetobacter phage SH-Ab15497 (SEQ ID NO: 113)
[0141] Salmonella phage PMBT28 (SEQ ID NO: 114)
[0142] Vibriophage phiVC8 (SEQ ID NO: 112)
[0143] Alteromonas phage ‘ZP6 (SEQ ID NO: 117)
[0144] Hiyaa phage (SEQ ID NO: 120)
[0145] Ghobes phage (SEQ ID NO: 116)
[0146] Wayne phage (SEQ ID NO: 115)
[0147] Goodman phage (SEQ ID NO: 118)
[0148] Theresita phage (SEQ ID NO: 119)

[0149] FIG. 2: Detection of 2-amino-2′-deoxyadenosine (dZ) in the genome DNA from bacteriophages.
[0150] A: Pattern of restriction endonuclease cleavage obtained with DNA from bacteriophages. Predicted profiles are shown on the left and observed profiles on the right. For Vibrio phage PhiVC8, restriction enzymes with A in site DraI, NcoI, NdeI, NheI are inefficient. For Gordonia phage Ghobes: Enzymes with A in site HindII, BglII, NcoI are inefficient. For Arthrobacter phage Wayne: Enzymes with A in site SalI, HindIII are inefficient but BamHI and XhoI are efficient.
[0151] B: HPLC profiles of the nuclease and phosphatase digests obtained with genome DNA from bacteriophages.

[0152] FIG. 3: Discrimination between aminoadenine and adenine by siphoviral DpoZ polymerases on homopolymer templates.
[0153] The primer extension assays were performed on homopolymer templates using purified versions of His-tagged polymerases produced from the genes encoding the DpoZ phage enzymes or the PolA Klenow fragment of E. coli. Polymerase activity was tested for its ability to elongate a fluorescent (FAM) labeled primer annealed to an unlabeled template.
[0154] A: Sequences of primer-template duplexes used for DNA synthesis and chemical nature of the dNTP substrate added to the reaction mix. Z nucleotides contain the 2-aminoadenine base. FAM-labelled primer: X1903 (sequence shown in Table 3). Template: X1904 (sequence shown in Table 3).
[0155] B: Polymerization products loaded on denaturing 17% polyacrylamide gels. Lane numbers refer to the primer-template pair and dNTP indicated in A. The gels show extension products synthesized by DNA polymerase for 30 minutes at 37° C.

[0156] FIG. 4: Exonuclease activity of DpoZ polymerases on DNA single-strands and double-strands.
[0157] A: A 5′-labeled single-strand DNA template (X1459; sequence shown in Table 3) was incubated 5 or 60 minutes at 37 C (in absence of dNTP substrate) with a wild-type DNA polymerase or a 3′-exonuclease-disabled mutant thereof. Reaction products were loaded on denaturing 17% polyacrylamide gels.
[0158] B: A 5′-labeled primer (X1903; sequence shown in Table 3) was annealed to an unlabeled template (X1904; sequence shown in Table 3) and the resulting duplex was incubated 5 or 60 minutes at 37 C (in absence of dNTP substrate) with a wild-type DNA polymerase or a 3′-exonuclease-disabled mutant thereof. Reaction products were loaded on denaturing 17% polyacrylamide gels.

[0159] FIG. 5: Discrimination between aminoadenine and adenine by siphoviral DpoZ polymerases on heteropolymer templates.
[0160] A: The assays were performed as in FIG. 4 except that the template corresponded to a sequence of 50 nucleotides from the genome of the bacteriophage SH-Ab 15497.
[0161] B: DNA synthesis catalyzed by wild-type DNA polymerases in response to Z-containing template (X2586) and primer (X2587).
[0162] C: DNA synthesis catalyzed by wild-type DNA polymerases in response to A-containing template (X2364) and primer (X2365).

[0163] D: DNA synthesis catalyzed by 3′-exonuclease-disabled mutant DNA polymerases in response to Z-containing template (X2586) and primer (X2587). The sequences of the templates and primers are shown in Table 3.

[0164] FIG. 6: Alignments produced by the MAFFT software with the sequences of the DpoZ family proteins. The positions indicated by an arrow correspond to the phylogenetically informative sites selected by the BGME software (Default parameters of MAFFT: gap extension penalty: 0.123; gap opening penalty: 1.53; matrix: blosum62. Default parameters of BMGE: matrix: blosum62; sliding window size: 3; maximum entropy threshold: 0.5; gap-rate cutoff: 0.5; minimum block size: 5).
[0165] Acinetobacter phage SH-Ab15497 (SEQ ID NO: 113)
[0166] Salmonella phage PMBT28 (SEQ ID NO: 114)
[0167] Vibriophage ‘phiVC8 (SEQ ID NO: 112)
[0168] Alteromonas phage ‘ZP6 (SEQ ID NO: 117)
[0169] Hiyaa phage (SEQ ID NO: 120)
[0170] Ghobes phage (SEQ ID NO: 116)
[0171] Wayne phage (SEQ ID NO: 115)
[0172] Goodman phage (SEQ ID NO: 118)
[0173] Theresita phage (SEQ ID NO: 119)

[0174] FIG. 7: Comparison of active sites between bacterial PolA and siphoviral DpoZ. Perfect conservation of amino acids is observed at the catalytic positions of the 3′-exonuclease domain and of the A motif in the polymerase palm domain, while the B and C motifs are subject to more variations (Loh and. Loeb, DNA Repair. 4, 1390-1398 (2005)).

[0175] FIG. 8: Discrimination between dGTP and dITP by siphoviral DpoZ polymerases on a polydC homopolymer template. Polymerase activity was tested for its ability to elongate a fluorescent (FAM) labeled primer (X1903; see Table 3 for the sequence) annealed to an unlabeled template (X1929; sequence shown in Table 3).

[0176] In this specification, a number of documents including patent applications are cited. The disclosure of these documents, while not considered relevant for the patentability of this invention, is herewith incorporated by reference in its entirety. More specifically, all referenced documents are incorporated by reference to the same extent as if each individual document was specifically and individually indicated to be incorporated by reference.

[0177] The invention will now be described by reference to the following examples which are merely illustrative and are not to be construed as a limitation of the scope of the present invention.

### EXAMPLES

[0178] In the Examples, the following materials and methods were employed.

### Materials and Methods

### Chemicals, Oligonucleotides and Culture Medium

[0179] Chemicals were purchased from Sigma Aldrich (Tris HCl, MgCl₂, NaCl, glycerol), NEB biolabs (BSA), Biosolve (DTT) and dNTPs from Invitrogen. Oligonucleotides were synthesized by Eurofins Genomics, their sequences are listed in Table 3. Bacteria were routinely grown in Luria-Bertani medium (LB) at 37° C. When required, antibiotics were added at the following concentrations: 25 mg/L chloramphenicol and 30 mg/L kanamycin.

### Phylogenetic Study

[0180] Evolution of the purZ and dpoZ protein families was investigated by reconstructing the phylogenetic trees relating their sequences, translated from the genomes of the ten bacteriophages included in the study. From each set of orthologs, a multiple alignment was computed using the software MAFFT (Katoh and Standley, Molecular Biology and Evolution. 30, 772-780 (2013)) with default parameters. Phylogenetically informative regions were selected in each multiple sequence alignment using the software BMGE with default parameters and retained for downstream analysis. Using the software MrBayes (Huelsenbeck and Ronquist, Bioinformatics. 17, 754-755 (2001)), under a GTR model (Benner et al., Bioinformatics 30 (2014); DOI: 10.1093/bioinformatics/btu461), one million samples were generated from the posterior distribution of the trees relating PolZ (respectively DpoZ) using a parallel Monte Carlo Markov Chain algorithm with 3 parallel chains initialized with an unresolved star tree. After discarding the first 100,000 samples for each of the two phylogenetic trees and retaining every 1000th sample to eliminate auto-correlation, the respective posterior averages of the two sample sets were computed using the software TFBayes (Benner et al., Bioinformatics. 30, i534-i540 (2014)). Final processing was performed with the software FigTree, using mid-point rooting and rotating edges to produce an identical ordering of the species included in both trees.

### Purification of Phage DNA

[0181] PhiVC8: 8 billion V. cholerae 01 (Mexico) cells were infected with 80 billion phages in 1 L of LB supplemented with 10 mM CaCl₂) for 16h at 37° C. The cellular debris were centrifuged at 10′000 g for 20 min at 4° C. The supernatant was filtered through a 0.22 μM membrane and the phage particles were precipitated by adding PEG 8000 10% and NaCl 1M at 4° C. for 16h. The mixture was centrifuged at 16′000 g for 20 min at 4° C. and the pellet was resuspended in 50 mM Tris pH 7.4, 100 mM NaCl, 50 mM MgSO₄ before loading a cesium chloride step gradient (from 1.3 to 1.6 g/mL). Pure phages were recovered after a centrifugation at 100′000 g for 16h at 4° C. in a SW41 Rotor. The phages were dialyzed two times against 100 mM Tris pH7.4, 3M NaCl for 16h at 4° C. and once against 100 mM Tris pH7.4, 100 mM NaCl, 50 mM MgSO₄. DNA was prepared by phenol chloroform extraction and ethanol precipitation. Wayne and Ghobes: Phages were amplified by 30-Plate Infection, harvested and concentrated as described above. After centrifugation for 10 minutes at 5′500 g at 4° C., phage pellets were resuspended in about 4-6 mL CaCl₂ buffer solution. CsCl was added to obtain a phage density of 1.5 g/mL and centrifuged at 38′000 rpm for 16 hours. Phages were collected and dialyzed against phage buffer at 4° C. DNA was prepared from phage suspensions by phenol chloroform extraction and ethanol precipitation. Protocols are detailed in the section of the actinobacteriophage database: https://phagesdb.org/workflow/Enzymatic hydrolysis of DNA and analysis of the digests by LC-MS were performed essentially as described by Crain (Methods in Enzymology (Elsevier, 1990)).

### Cloning and Purification of DNA Polymerases

[0182] DNA polymerases from Vibrio phage PhiVC8 (AEM62926.1) and from Arthrobacter phage Wayne (ARE89872.1) were amplified from their genomic DNA using as primer couples of oligonucleotides X1168/X1169 and X1840/X1841, respectively. Amplicons were digested with PacI and NotI endonucleases and ligated with a plasmid pGEN452 digested by PvuI and NotI. The vector pGEN452 is a derivative of pet47b plasmid (Novagen) whose MCS has been changed between SaclI and AvrlI to the following sequence 5′-CCGCGGCCCGATCGCCGCGCGGCCGCAAGCTTCCTAGG-3′ (SEQ ID NO: 235).

[0183] Synthetic genes encoding DNA polymerases from Acinetobacter phage SH-Ab-15497 (AUG85479.1) and Gordonia phage Ghobes (YP_009281142.1) were obtained from Eurofins Genomics and cloned in the pGEN452 vector. All these plasmids featured an N-terminus of 6 His residues and were used to transform the BL21 C43 strain (Sigma) for protein production. Cultures were grown in LB medium up to an OD (600 nm) of about 0.3 then induced by adding 0.5 mM IPTG and incubated for 16 h at 16° C. Cells were pelleted and frozen overnight at −20° C. Pellets were then lyzed in buffer containing 50 mM NaH2PO4 pH 8, 300 mM NaCl, 1 mM DTT, using lyzonase (Sigma) for 20 min at 30° C. and finally subjected to sonication. The lysate was centrifuged at 10′000 g for 30 min and the supernatant was applied to Protino Ni-TED columns (Macherey Nagel). The eluted proteins were concentrated on Amicon Centricon (50 kDA) (Millipore).

### Mutagenesis of DNA Polymerases

[0184] DpoZ genes from each bacteriophage were also cloned in the P15A plasmid pVDM18 previously described (Pezo et al., Sci Rep. 3, 1359 (2013)). Exonuclease mutants were constructed by site directed mutagenesis of pVDM18 Pol constructs using X1379/X1380 oligonucleotides for Vibrio phage PhiVC8 DNA pol (D85A mutation), X1865/X1866 for Arthrobacter phage Wayne DNA pol (D146A mutation), X1990/X1991 for Acinetobacter phage SH-Ab-15497 (D74A mutation), X1867/X1868 for Gordonia phage Ghobes DNA pol (D109A mutation) and X1601/X1602 for Klenow fragment of E. coli DNA pol I (D101A mutation). Mutations were verified by full sequencing of the constructs. These mutants were also sub-cloned into the pGEN452 vector downstream a His6-tag for protein expression

### Primer Extension Assays Templated by Homopolymers or Heteropolymers

[0185] Primer extension assays were carried out following a published protocol (Wynne et al., PLoS ONE. 8, e70892 (2013)). Each reaction mix consisted of 100 μL volume containing 1 μM of the FAM-fluorescent-labeled 20-mer primer X1903, 3 μM of the 42-mer template (FIG. 3), 20 mM Tris-HCl (pH 7,5) buffer, 200 mM NaCl (except for Wayne DNA polymerase 50 mM NaCl), 1 mM DTT, 5 mM MgCl₂ and 1 mM dNTP. Primer:template duplexes were annealed by denaturation 2 min at 95° C., and cooled down to 4° C. (0.1° C./s). Polymerisation assay was started by adding 0,034 μM of DNA polymerases after 5 min of primer-template duplexes pre-heating at 37° C. Reactions were incubated at 37° C. for 30 min and 10 μL of reaction were mixed to 10 μL of quenching buffer (98% formamide, 10 mM EDTA). Extension products were separated by electrophoresis migration in denaturing polyacrylamide gels (7M, 1×TBE, 17% acrylamide gel). Gels were analyzed using the G-BOX (Ozyme) and band intensities were quantified with Genetools software (Syngene).

### Determination of Kinetic Parameters of DNA Polymerases

[0186] Kinetic parameters were determined in a single nucleotide extension assay using DNA polymerase mutants devoid of 3′exonuclease activity, followed by denaturing polyacrylamide gel electrophoresis of the extended products essentially as described (O'Flaherty and Guengerich, Current Protocols in Nucleic Acid Chemistry. 59 (2014)). The fluorescent oligonucleotide X1648 was annealed to X1649 template. Duplex substrates were used at 500 nM concentration in reaction buffer (20 mM TrisHCl pH7, 200 mM NaCl, 2 mM DTT, 5 mM MgCl2), with different enzymes concentrations and various dNTPs concentrations. Reactions were performed at 37° C. for variable times in conditions to remain in the confines of the steady-state kinetic model e.g. remaining below 20% of product formation (Creighton et al., Methods in Enzymology (Elsevier, 1995; https://linkinghub.elsevier.com/retrieve/pii/0076687995620214), vol. 262, pp. 232-256).

### Example 1: Identification of a New Functional Class of Polymerases, the DpoZ Family

[0187] Protein databases (Uniprot) were searched using the PurZ sequence from phage S-2L as query. In this search a cluster of homologs of the PurZ sequence was identified with all identified sequences belonging to the Siphoviridae bacteriophages (Siphoviruses). The viruses of this cluster infect cellular hosts as distant as Gram-negative proteobacteria (Vibrio, Salmonella and Acinetobacter) Gram-positive actinobacteria (Arthrobacter and Gordonia) and cyanobacteria (Synechococcus) and dwell habitats as diverse as soil, freshwater and seawater. A summary of the results is shown in Table 1.

TABLE 1

| | | | | | PurZ | DpoZ |
|---|---|---|---|---|---|---|
| Case | | | Size | | (PurA | (PolA |
| studied | Species | Genome | kbp | G + C % | paralog) | paralog) |
| X | Synechococcus phage S-2L | AX955019.1 | 45.57 | 69.4 | 1 | |
| X | Vibrio phage phiVC8 | JF712866.1 | 39.42 | 50.8 | 1 | 1 |
| | Vibrio phage QH | KM612259.1 | 39.73 | 50.5 | 1 | 1 |
| | Vibrio phage JSF15 | KY883642.1 | 39.64 | 50.7 | 1 | 1 |
| | Vibrio phage CJY | KM612260.1 | 39.54 | 50.6 | 1 | 1 |
| | Vibrio phage H2 SGB-2014 | KM612262.1 | 39.53 | 50.5 | 1 | 1 |
| | Vibrio phage J2 | KM612264.1 | 39.53 | 50.6 | 1 | 1 |
| | Vibrio phage H1 | KM612261.1 | 39.53 | 50.5 | 1 | 1 |
| | Vibrio phage H3 | KM612263.1 | 39.53 | 50.5 | 1 | 1 |
| | Vibrio phage J3 | KM612265.1 | 39.78 | 50.5 | 1 | 1 |
| | Vibrio phage Rostov 6 | MH105773.1 | 39.93 | 50.7 | 1 | 1 |
| | Vibrio phage JSF33 | KY883647.1 | 39.66 | 50.6 | 1 | 1 |
| | Vibrio phage VP5 | AY510084 | 39.78 | 50.5 | 1 | 1 |
| | Vibrio phage VP2 | AY5505112 | 39.85 | 50.6 | 1 | 1 |
| | Podoviridae sp. ctpVR23 | MN582112.1 | 37.41 | 49.4 | 1 | 1 |
| | Alteromonas phage ZP6 | MK203850.1 | 37.74 | 50.1 | 1 | 1 |
| | Ochrobactrum phage vBOspPOH | MT028492.1 | 41.23 | 55.2 | 1 | 1 |
| X | Acinetobacter phage SH-Ab 15497 | MG674163.1 | 43.42 | 47.9 | 1 | 1 |
| | Salmonella phage PMBT28 | MG641885.1 | 48.11 | 58.6 | 1 | 1 |
| | Siphoviridae sp. | MH622939.1 | 48.74 | 61.7 | 1 | 1 |
| | Bacillus phage vB_BpsS-140 | MH884512.1 | 55.09 | 39.8 | 1 | |
| X | Arthrobacter phage Wayne | KU160672.2 | 44.37 | 61.1 | 1 | 1 |
| | Arthrobacter phage Litotes | MK279863.1 | 43.5 | 61.1 | 1 | 1 |
| | Arthrobacter phage AppleCider | MN735429.1 | 43.7 | 61.1 | 1 | 1 |
| | Arthrobacter phage CallieOMalley | MK112535.1 | 43.86 | 61.2 | 1 | 1 |
| | Arthrobacter phage Suppi | KX621004.1 | 43.91 | 61.2 | 1 | 1 |
| | Arthrobacter phage Canowicakte | MF140400.1 | 43.91 | 61.2 | 1 | 1 |
| | Arthrobacter phage DreamTeam | MK919484.1 | 43.09 | 60.7 | 1 | 1 |
| | Arthrobacter phage Bennie | KU160640.2 | 43.08 | 61.4 | 1 | 1 |
| | Arthrobacter phage MeganNoll | MG198782.1 | 44.26 | 60.9 | 1 | 1 |
| | Arthrobacter phage Korra | KU160653.2 | 43.71 | 61.1 | 1 | 1 |
| | Arthrobacter phage BigMack | MK112529.1 | 43.36 | 61.3 | 1 | 1 |
| | Arthrobacter phage Vallejo | KX621005.1 | 43.61 | 61.0 | 1 | 1 |
| | Arthrobacter phage Dino | MF140407.1 | 43.56 | 61.1 | 1 | 1 |
| | Arthrobacter phage Fluke | MG198781.1 | 43.81 | 60.9 | 1 | 1 |
| | Arthrobacter phage Carpal | MK112538.1 | 43.71 | 61.0 | 1 | 1 |
| | Arthrobacter phage Beethoven | MK112528.1 | 43.93 | 61.0 | 1 | 1 |
| | Arthrobacter phage Immaculata | KU160649.1 | 43.66 | 61.0 | 1 | 1 |
| | Arthrobacter phage Cholula | MK279845.1 | 43.66 | 61.0 | 1 | 1 |
| | Arthrobacter phage Rozby | MK279876.1 | 43.2 | 61.0 | 1 | 1 |
| | Arthrobacter phage Wawa | MK279892.1 | 43.85 | 60.9 | 1 | 1 |
| | Arthrobacter phage Potatoes | MK279901.1 | 43.66 | 61.0 | 1 | 1 |
| | Arthrobacter phage MrGloopy | MK660714.1 | 43.7 | 60.9 | 1 | 1 |
| | Arthrobacter phage Scuttle | MK814749.1 | 43.73 | 61.1 | 1 | 1 |
| | Arthrobacter phage Riverdale | MK279875.1 | 43.39 | 61.0 | 1 | 1 |
| | Arthrobacter phage TattModd | MK279886.1 | 43.55 | 61.0 | 1 | 1 |
| | Arthrobacter phage HeadNerd | MK279907.1 | 42.97 | 61.4 | 1 | 1 |
| | Arthrobacter phage RAP15 | KU160662.1 | 44.26 | 60.9 | 1 | 1 |
| | Arthrobacter phage Savage2526 | MK279880.1 | 43.42 | 61.0 | 1 | 1 |
| | Arthrobacter phage DrRobert | KU160643.1 | 42.6 | 60.6 | 1 | 1 |
| | Arthrobacter phage PitaDog | MF140425.1 | 42.96 | 60.7 | 1 | 1 |
| | Arthrobacter phage Glenn | KU160645.1 | 44.39 | 60.8 | 1 | 1 |
| | Arthrobacter phage Zorro | MK279896.1 | 43.56 | 61.1 | 1 | 1 |
| | Arthrobacter phage Lucy | KX576641.1 | 42.94 | 60.7 | 1 | 1 |
| | Arthrobacter phage Moki | MH744421.1 | 43.16 | 61.3 | 1 | 1 |
| | Arthrobacter phage Huckleberry | MK279856.1 | 42.97 | 61.4 | 1 | 1 |
| | Arthrobacter phage ChewChew | MK279844.1 | 43.44 | 60.7 | 1 | 1 |
| | Arthrobacter phage Pterodactyl | MK279872.1 | 43.27 | 60.8 | 1 | 1 |
| | Arthrobacter phage Christian | MF140404.1 | 43.08 | 60.7 | 1 | 1 |
| | Arthrobacter phage Preamble | KU160659.1 | 43.37 | 60.7 | 1 | 1 |
| | Arthrobacter phage Lennox | MK279862.1 | 43.09 | 60.7 | 1 | 1 |
| | Arthrobacter phage Bodacious | MK112531.1 | 43.24 | 60.7 | 1 | 1 |
| | Arthrobacter phage CristinaYang | MK279847.1 | 43.37 | 60.7 | 1 | 1 |
| | Arthrobacter phage Lasagna | MK279860.1 | 42.6 | 60.8 | 1 | 1 |
| | Arthrobacter phage Nancia | MK279867.1 | 43.24 | 60.7 | 1 | 1 |
| | Arthrobacter phage LilStuart | MN813680.1 | 42.95 | 60.7 | 1 | 1 |
| | Arthrobacter phage OurGirlNessie | MK279869.1 | 42.56 | 60.7 | 1 | 1 |
| | Arthrobacter phage Aledel | MK112526.1 | 43.74 | 61.6 | 1 | 1 |
| | Arthrobacter phage Eunoia | MK279851.1 | 44.42 | 61.5 | 1 | 1 |
| | Arthrobacter phage OMalley | MK279868.1 | 43.74 | 61.6 | 1 | 1 |
| | Arthrobacter phage Riovina | MK279874.1 | 43.74 | 61.6 | 1 | 1 |
| | Arthrobacter phage HunterDalle | KU160648.1 | 43.34 | 61.6 | 1 | 1 |
| | Arthrobacter phage Vulture | KU160671.1 | 43.34 | 61.6 | 1 | 1 |
| | Arthrobacter phage Supakev | MK279884.1 | 43.76 | 61.7 | 1 | 1 |
| | Arthrobacter phage EstebanJulior | MK919476.1 | 43.75 | 61.3 | 1 | 1 |
| | Arthrobacter phage Urla | MG198779.1 | 43.94 | 61.2 | 1 | 1 |
| | Arthrobacter phage Pumancara | KU160661.1 | 42.83 | 61.7 | 1 | 1 |
| | Arthrobacter phage Joann | KU160652.1 | 44.18 | 60.7 | 1 | 1 |
| | Arthrobacter phage Greenhouse | KX688103.1 | 43.98 | 60.8 | 1 | 1 |
| | Arthrobacter phage Temper16 | MF668285.1 | 43.95 | 61.9 | 1 | 1 |
| | Arthrobacter phage Daiboju | MH450117.1 | 43.95 | 61.9 | 1 | 1 |
| | Arthrobacter phage Herb | MH450118.1 | 43.95 | 61.9 | 1 | 1 |
| | Arthrobacter phage KingBob | MH450121.1 | 43.95 | 61.9 | 1 | 1 |
| | Arthrobacter phage Maria1952 | MN586061.1 | 43.95 | 61.9 | 1 | 1 |
| | Arthrobacter phage Sergei | MH450131.1 | 43.95 | 61.9 | 1 | 1 |
| | Arthrobacter phage Oxynfrius | KX688102.1 | 44.16 | 60.8 | 1 | 1 |
| | Arthrobacter phage Nubia | MF140424.1 | 44.05 | 60.7 | 1 | 1 |
| | Arthrobacter phage GreenHearts | MK279854.1 | 44.25 | 60.8 | 1 | 1 |
| | Arthrobacter phage RcigaStruga | KX576640.1 | 43.89 | 60.7 | 1 | 1 |
| | Arthrobacter phage Huntingdon | MG210949.1 | 43.89 | 60.7 | 1 | 1 |
| X | Gordonia phage Ghobes | KX557278.1 | 45.29 | 65.2 | 1 | 1 |
| | Streptomyces phage Hiyaa | MK279841.1 | 83.22 | 66.7 | 1 | 1 |
| | Streptomyces phage Galactica | MT316461.1 | 81.22 | 66.9 | 1 | 1 |
| | Microbacterium phage Sucha | MK737942.1 | 41.83 | 66.1 | 1 | 1 |
| | Microbacterium phage Theresita | MK660713.1 | 40.23 | 65.9 | 1 | 1 |
| | Microbacterium phage Zanella | MN369765.1 | 42.11 | 67.0 | 1 | 1 |
| | Microbacterium phage Goodman | MK016495.1 | 42.36 | 66.3 | 1 | 1 |
| | Microbacterium phage Johann | MK016497.1 | 42.36 | 66.3 | 1 | 1 |
| | Oleibacter marinus | NZ_FT0H00000000 | 3859 | 53.1 | 2 | 1 |
| | Desulfobulbus sp | JROS00000000 | 4200 | 59.0 | 2 | 1 |
| | Chondromyces crocatus | CP012159 | 11300 | 68.7 | 3 | |

[0188] Strikingly, a gene homologous to polA for DNA polymerase I was found to occur in synteny with purZ in all these phage genomes, but not in S-2L.

[0189] Protein sequence alignments revealed that the identified phage polymerase homologs corresponded precisely to the Klenow fragment of E. coli PolA lacking the 5′-exonuclease domain but retaining the 3′-exonuclease domain (FIG. 1). The presumptive polymerase gene from Siphoviruses was designated dpoZ, in accordance with Demerec's nomenclature Genetics 54 (1966), 61-67; see also https://jb.as.org/content/nomenclature). FIG. 6 shows an alignment of 9 of the identified dpoZ genes produced by the MAFFT software.

### Example 2: Comparative Phylogeny of DpoZ and PurZ

[0190] The synteny between the dpoZ and purZ genes in the metabolic region of siphoviral genomes suggested that the two functions coexisted in a common ancestor encoded with the Z base and have since coevolved. Thus, a phylogenetic study was conducted to test this hypothesis. A phylogenetic tree was reconstructed separately for each family, by applying the same algorithmic method which consisted in the multiple alignment of sequence families followed by a posteriori average reconstruction using a GTR model (Benner et al., Bioinformatics 30 (2014); DOI: 10.1093/bioinformatics/btu461)). Two almost perfectly congruent unrooted trees were obtained for PurZ and DpoZ.

[0191] The slightly different placement of the Hiyaa phage in the two trees is not disturbing given that its genome displays a dislocated synteny and a size twice as large (83 kbp) as that of the other siphoviruses (see Table 1). The Synechococcus phage S-2L represents another special case, as it does not encode a PolA homolog and can therefore only be analyzed using the PurZ tree. It should be noted that the genomic composition of the S-2L phage is the poorest in Z:T pairs of all siphoviruses bearing a purZ gene (see Table 1).

[0192] The tree obtained for the PurZ sequences places the S-2L phage in a branch with the phages infecting proteobacteria. This placement makes sense, considering that cyanobacteria and proteobacteria are Gram− while the actinobacterial hosts of other siphoviruses are Gram+. Overall, the phylogenetic study indicated that the base Z has been used as an information carrier among siphoviruses since at least a date prior to the evolutionary divergence between actinobacteria, cyanobacteria and proteobacteria. The paralogous character of sequence homologies within the PurA/PurZ on the one hand, and PolA/DpoZ on the other hand, raises the question of the nature of the information carrier in their common ancestor, either A or Z, at an earlier evolutionary stage.

### Example 3: DNA Composition of DpoZ-Encoding Phages

[0193] To ascertain the presence of dZ in siphoviral genomes that include purZ genes and the newly identified dpoZ genes, chemical analysis of phage DNA was applied. Phage DNA was purified as described above in the Material and Methods section. Enzymatic digestion by restriction endonucleases of the genomic DNA from the bacteriophage samples was found to follow cleavage patterns congruent with those reported for S-2L DNA (FIG. 2A). In particular, the restriction enzymes cleaving adenine-containing hexamers did not digest DNA from the Vibrio phage (PhiVC8), Gordonia phage (Ghobes) nor Arthrobacter phage (Wayne), strongly suggesting that they all contain aminoadenine (FIG. 2A).

[0194] Chemical evidence for the absence of deoxyadenosine (dA) and presence of 2-aminodeoxyadenosine (dZ) was provided by HPLC fractionation and mass spectrometry applied to enzymatic hydrolysates of phage DNA (FIG. 2B). A minor fraction of dA was found together with dZ in the DNA from the Arthrobacter phage (FIG. 2B).

### Example 4: Analysis Whether dZTP can Act as a Substrate for dpoZ-Encoded Polymerases

[0195] The replacement of adenine with aminoadenine in phage DNA, consistent with the synteny of purZ and dpoZ in siphoviral genomes, led to the investigation whether dZTP can act as substrate of dpoZ-encoded polymerases.

### (a) Discrimination Against Adenine and for Aminoadenine

[0196] The fact that a DNA polymerase is encoded by Z-containing genomes begs the question whether the viral enzyme DpoZ could discriminate for aminoadenine and against adenine during replication. In this context, experiments of primer extension using simple combinations of Z- or A-containing deoxynucleoside triphosphates and templates were performed as described in the Material and Methods section.

[0197] It is shown in FIG. 3 that dZTP leads to the formation of full-length products in response to (dT)24 template using the His-tagged versions of the four phage polymerases produced in E. coli and purified to homogeneity. By contrast dATP leads to incomplete polymerization products under the same conditions.

[0198] A similar discrimination effect for Z and against A is also observed when dTTP is reacted by DpoZ enzymes in response to polypurine templates (dA)24 and (dZ)24. Again, a congruent activity is observed for the four siphoviral DpoZ, which form full-length products only when dZTP is provided as substrate (FIG. 3B). Remarkably, the Klenow fragment of PolA from E. coli (His-tagged identically) catalyzes the polymerization of full-length product with all the combinations of substrates and templates, showing little discrimination for or against Z (FIG. 3B).

[0199] The coexistence of degradation and polymerization activities in DpoZ and PolA enzymes complicates the precise measurement of kinetic parameters. Thus, it was attempted to disable DNA degradation in DpoZ by mutating the catalytic site of 3′-exonuclease performing the proofreading activity. Corresponding mutants were constructed as described in the Materials and Methods section. As expected, fluorescent primers no longer underwent degradation by the mutant DpoZ enzymes (FIG. 4). However, the mutation inactivating 3′-exonuclease also diminished polymerase activity in the case of the Arthrobacter phage and abolished it in the case of the Gordonia phage. Kinetic parameters were thus measured only using exonuclease-disabled versions of the Vibrio and Acinetobacter phage DpoZ. As shown in Table 2, quantitative confirmation of the discrimination effect qualitatively displayed in FIG. 3 was obtained by measuring the affinity (KM) and turnover number (kcat) of the two DpoZ enzymes compared with Klenow PolA. A higher factor of 90-fold in catalytic efficiency with dZTP relative to dATP was calculated in the case of the Vibrio phage and of 29-fold in the case of the Acinetobacter phage, to be compared with 0.5-fold in the case of the Klenow enzyme.

TABLE 2
Enzymology of the discrimination between dZTP and dATP by siphoviral DNA polymerases.

| DNA | K_{M} (mM) | | K_{M} ^{(A)}/ | k_{cat} (s⁻¹) | | k_{cat}^{(Z)}/ | Efficiency (mM⁻¹ s⁻¹) | | K_{M} ^{(A)} k_{cat}^{(Z)}/ |
|---|---|---|---|---|---|---|---|---|---|
| polymerase | dZTP | dATP | K_{M}^{(Z)} | dZTP | dATP | k_{cat}^{(A)} | dZTP | dATP | K_{M}^{(Z)} k_{cat}^{(A)} |
| E. coli | 0.81 ± 0.14 | 0.70 ± 0.17 | 0.86 | 13.96 ± 1.99 | 20.61 ± 1.52 | 0.68 | 17.73 ± 4.96 | 30.40 ± 5.82 | 0.58 |
| Klenow | | | | | | | | | |
| fragment | | | | | | | | | |
| Vibrio phage | 0.10 ± 0.02 | 4.50 ± 1.38 | 45.00 | 0.42 ± 0.14 | 0.21 ± 0.05 | 2.00 | 4.35 ± 1.56 | 0.048 ± 0.017 | 90.62 |
| PhiVC8 | | | | | | | | | |
| Acinetobacter | 1.30 ± 0.36 | 21.40 ± 3.40 | 16.47 | 0.29 ± 0.07 | 0.16 ± 0.01 | 1.81 | 0.23 ± 0.06 | 0.008 ± 0.001 | 28.75 |
| phage | | | | | | | | | |
| SH-Ab 15497 | | | | | | | | | |

[0200] The Km affinity constant and the kcat turnover number of 3′-exonuclease-disabled and His-tagged versions of DpoZ polymerases from Vibrio phage PhiVC8 and Acinetobacter phage SH-Ab 15497 are shown in comparison with PolA polymerase (Klenow fragment) from E. coli. The average and standard deviation of three independent assays carried out under the same conditions are given for each experiment.

[0201] To emulate polymerization processes closer to the natural history of the phages, primer extension assays were also conducted using templates corresponding to a 50-mer sequence from the siphoviral genome SH-Ab 1549 (FIG. 5). Judging by the size of elongation products, the dZTP substrate is preferred to dATP by siphoviral DNA polymerases, whether the template contains Z or A (FIGS. 5B and 5C). This result contrasts with Klenow bacterial DNA polymerase, which shows a preference for dATP with A-containing template. Mutant polymerases lacking 3′-exonuclease activity produce longer elongation products with dATP, compared to wild-type DpoZ in the case of the proteobacterial phages PhiVC8 and SH-Ab-15497 (FIG. 5D). As noted previously, only attenuated polymerase activity remains in the DpoZ mutant enzymes lacking 3-exonuclease activity in the case of Ghobes and Wayne actinobacterial siphoviruses (FIG. 5D).

### CONCLUSION

[0202] The present invention describes a novel category of DNA polymerases encoded with an alien nucleobase (2-aminoadenosin) and discriminating against the incorporation of the canonical counterpart (adenosine). So far, no cellular polymerase that ostracizes a canonical base had been described. The newly identified polymerases open up new possibilities for chemically diversifying replicons in vivo.

[0203] The following oligonucleotides were employed in the above-described Examples:

| | Oligonucleotides |
|---|---|
| X1168 | 5′-GGGTTAATTAATGAAGCTAGATTGGGAAAG |
| | AACAGG-3′ |
| | (SEQ ID NO: 236) |
| X1169 | 5-GGGTCTATGCGGCCGCTTAATGTACATCGA |
| | TTAATCCTTTTGCTTCGG-3′ |
| | (SEQ ID NO: 237) |
| X1840 | 5′-GGGTTATTAATGGCGCGAGTGCGCCTACTG |
| | -3′ |
| | (SEQ ID NO: 238) |
| X1841 | 5′-GGGTCTATGCGGCCGCTTACCGGTTCCATT |
| | CCTTCG-3′ |
| | (SEQ ID NO: 239) |
| X1379 | 5′-GTCATAACGCGTCATTTGCGTACAGAATGT |
| | CG-3′ |
| | (SEQ ID NO: 240) |
| X1380 | 5′-CGACATTCTGTACGCAAATGACGCGTTATG |
| | AC-3′ |
| | (SEQ ID NO: 241) |
| X1865 | 5′-CATGAAGTTCGCGCTGCACCAGTTCCGCGC |
| | TGG-3′ |
| | (SEQ ID NO: 242) |
| X1866 | 5′-CTGGTGCAGCGCGAACTTCATGTTCTGCAT |
| | GTCC-3′ |
| | (SEQ ID NO: 243) |
| X1990 | 5′-TCAAGTTTGCGATTCATATGCTCCGTGCAA |
| | CAGGG-3′ |
| | (SEQ ID NO: 244) |
| X1991 | 5′-ATATGAATCGCAAACTTGATGTTGTGATTA |
| | AC-3′ |
| | (SEQ ID NO: 245) |
| X1867 | 5′-GTGGCTTTCGCGCTGCAACTTGTTAACGGC |
| | GG-3′ |
| | (SEQ ID NO: 246) |
| X1868 | 5′-GTTGCAGCGCGAAAGCCACGTTGTGGCCAC |
| | ATAACCC-3′ |
| | (SEQ ID NO: 247) |
| X1601 | 5′-GGCAAAACCTGAAATACGCGCGCGGTATTC |
| | TGG-3′ |
| | (SEQ ID NO: 248) |
| X1602 | 5′-CCAGAATACCGCGCGCGTATTTCAGGTTTT |
| | GCC-3′ |
| | (SEQ ID NO: 249) |
| X1903 | 5′-FAM-CCCCTTATTAGCGTTTGCCC-3′ |
| | (SEQ ID NO: 250) |
| X2362 | 5′TGCCAACGCGGGACGTGGCCAGCCCGTAGA |
| | ATGTTTTGTATTTGCATCATTTCATTTTCT |
| | CCCGCGATAT-3′ |
| | (SEQ ID NO: 251) |
| X2363 | 5′-FAM-ATATCGCGGGAGAAAATGAA-3′ |
| | (SEQ ID NO: 252) |
| X2364 | 5-CGGGTCACATCTTGTGCCCGAAGGATGTCA |
| | CGGATGTTTAGTTTGTCCATGGTTCAATCT |
| | CGCTCCAAGG-3′ |
| | (SEQ ID NO: 253) |
| X2365 | 5′-FAM-CCTTGGAGCGAGATTGAACC-3′ |
| | (SEQ ID NO: 254) |
| X2366 | 5′-GAGGCCGGTGCCTGGTCCACCGGGCGTGCG |
| | AAGTACAGGTAGGGGGTCACTTCGCGGCCT |
| | GCCCCAACAG-3′ |
| | (SEQ ID NO: 255) |
| X2367 | 5′-FAM-CTGTTGGGGCAGGCCGCGAA-3′ |
| | (SEQ ID NO: 256) |
| X2368 | 5′-TGTCCGCCTGAGAAGTCGATCGGGTAGGCG |
| | AGGTATAGCGTCTTGGTCACAGCTTGACCG |
| | GTCCTTTCGT-3′ |
| | (SEQ ID NO: 257) |
| X2369 | 5′-FAM-ACGAAAGGACCGGTCAAGCT-3′ |
| | (SEQ ID NO: 258) |
| X2426 | 5′-TCCTTCCCAACGCGCGGGTCCAGAATCTTA |
| | ACGTCGATTTTTTTCATCATAACGGGTCAC |
| | GATCTCGTCG-3′ |
| | (SEQ ID NO: 259) |
| X2427 | 5′-FAM-CGACGAGATCGTGACCCGTT-3′ |
| | (SEQ ID NO: 260) |
| X1648 | 5′-FAM-GGTATTAGCGCGCTCG-3′ |
| | (SEQ ID NO: 261) |
| X1649 | 5′-GCGTTGTTCCGGAAGTCGAGCGCGCTAATA |
| | -3′ |
| | (SEQ ID NO: 262) |
| X1459 | 5′-FAM-CCCCTTATTAGCGTTTGCC |
| | AAAAAAAAAAAAAAAAAAAAAAAAA-3′ |
| | (SEQ ID NO: 263) |
| X1904 | 5′-TTTTTTTTTTTTTTTTTTTTTTT |
| | GGGCAAACGCTAATAAGG-3′ |
| | (SEQ ID NO: 264) |
| X2364 | 5′-CGGGTCACATCTTGTGCCCGAAGGATGTCA |
| | CGGATGTTTAGTTTGTCCATGGTTCAATCT |
| | CGCTCCAAGG-3′ |
| | (SEQ ID NO: 265) |
| X2365 | 5′-FAM-CCTTGGAGCGAGATTGAACC-3′ |
| | (SEQ ID NO: 266) |
| X2586 | 5′-CGGGTCZCZTCTTGTGCCCGZZGGZTGTCZ |
| | CGGZTGTTTZGTTTGTCCZTGGTTCZZTCT |
| | CGCTCCZZGG-3′ |
| | (SEQ ID NO: 267) |
| X2587 | 5′-FAM-CCTTGGZGCGZGZTTGZZCC-3′ |
| | (SEQ ID NO: 268) |
| X1929 | 5′-CCCCCCCCCCCCCCCCCCCCCCCCGGGCAA |
| | ACGCTAATAAGG-3′ |
| | (SEQ ID NO: 269) |

The application's sequence listing, which the Patent Office published only in electronic form, follows.

SEQUENCE LISTING (269 sequences)

SEQ ID NO: 1 - protein, 614 aa, Unknown
  IMGVR_UViG_3300027741_000250
MQIHNPTDVLPNKTNMVVAVDTETSGLFVDDGATVSIVSIAWREEGTQERLAKGITAYAFPFDQGRISEKTGQTQSAFDQDINLDREQWAHLMYWLSKQQLVFHNAKFDLHMLREGTREWGGVDLLDQTMWDTQLVQPLLDPLQSSGLKPTCSRLFGEGVAQEQHDVQAALKKQGTGLTKRFDLVDWAIVGPYAAQDAALTLRLAEVQWRRLETDDQHLAVLADREIQLMKVLYKMEQRGIGYDAERAEKSAEILRKLKAELEEQLPFKPTIPAAKAYYYGTLGIIPSKIGASGTPSLDNETIKKLAKKDIPHAQTYLRWTEVKSALEKWYGNWGKLVGQDGRLRTNFRQTKVVSGRLSVERVQLQAIPHDYQLNQLFGDGVEGVRAFFQPKGNHELWEIDVSQAEIRVAASVANCQPMRDRLERGEDAHDATTKLVFGIDKDHPDWDKYRSVGKRLTFGMLYGAGVRTTREQIKMHTGVDASESEVKQWVEQYRSAFPEFVQAAKYADQAVQKRGYVKLISGRLRHWGFDEQSHKAFNAVIQGGVAEAMKMAMIDVERLYPNLLLLQIHDSMVLEVPTKEAEETVMQVRDVLVATFEELFGIEFKADYKQWAK

SEQ ID NO: 2 - protein, 618 aa, Unknown
  DTR_891472
MQQFPDLLKFPEFSYDTETTGLNPMAGARVFGFSVSTPDGKDYYWDIRETPAAVDWINSIFKVYTGVIVCHNLSFDYRQSHATGIFMPLERCVDTVVQACLINEHEHAYSLDHLCKKYTSARKSGKELYEAMAKVLGGRATKNVQMKQIANAPISIVAPYAKDDTRGTLELYYYQVGEIKRQGLEKIIAFEREVTPVLIAAEMHGVRVDVPAAEQAVVGLSAEIKTMQKQLDEIAGFACNPQPSGQIKKLFDPKWRDGRWWANDGTPLTETGAGNASLGADALRMMSHPAADKILQLRSLIKTRDTFLVGHVLESSVNGRVYPSVNQTKGEDGGTGTGRLSYSGPALQQIPDRNKKISEIVKRVFLPDEGQVWVDADMASFEVRIFAHLVGTKDICQAYLDNPEIDFHQFVADMTGLVRNATYNGQPNAKQLNLSMIFNQGNGTTAEAMGMPWDWESFMPKDSSDGKEVVYKKAGAEAMAVIDKYHARLPGVKKLANGCKMTAEQRHWLFTRYGRHLRFPKGYKSYKASGILIQSTSADENKLNWLRINEALQGTDAKMLLNTHDSYSMSMPEEESLNIAKKVKEAVEKDRGLRVPLILEVQGAGKNWWESKSSKRWL

SEQ ID NO: 3 - protein, 583 aa, Unknown
  IMGVR_UViG_3300009788_000077
MSVLPNLLAAKTVVIDTETTGLDWKRDRICGYVITLGPMEGDSFYIPVRHETGPNIEANNVSNWLSESLRKDTRIVGHALKFDMHMLMNEGISLLDHDLECTMVNAALIDENCGRYALEPQAVLMGVEPKKSKIMYEYLSLKFGENPVQKQMENFHKLPADDEMAHEYAKGDGTTTWQIWQKQQELLDFEELRRVWEVECRVIKSLFRMERKGVKVDEDRLAVVKLKLSEMLEEANRALPDDFNPRSTKQMQKFMEENGQTGWPMTEKGNPSFPEAWLRTHDIGNKILRSKKVSNLLNSFLEPLIDRHMFNGRVHTNFNQLKQEDYGTVSGRLSSSNPNMQQVPKRDKELAPLFRSIFVPDEGYVWYSNDYAQQEFVVFTHYTGNKMLVDGYNAEPPIDIHSNIAELLNVERDPTAKRMNLGMVYGMGAKALAQNLGITVLEAKKLIGKYHILIPEARHFLKKAESRAKTRGHVYTALGRRRRFPDYRFAHKAGNQIIQGTSADITKLKMAEVDEYFKCNEHVDMLLQVHDELCWQIKDDPGLNDVAVRMMTNFGRSQPITLKVPLRVDSSTGKNWGEASFGE

SEQ ID NO: 4 - protein, 597 aa, Unknown
  IMGVR_UViG_3300010049_000003
LDTECTGLDWVRKDRVFGISLAWRDNQNKLCSWYGDVRDESTRRWCLDVIPKLGRVTGWYLKYDMHMLRESNIPLAAGAADCSMIRECLLHEDEYDYSLDAVSQRRFGEHKADPWADLATLYDGKPTKEAQATNLHRAPFHVVEAYAKKDAELALRNWEAQETEIRLQGLNLVATMERELLEVIVDMERGGVRVDVARAEEAIPQMTQAVHESQQSLDKLAGHPINVNSQPQVKELLGVHKASDGRWYTKCGVLLEPTESGKSGQLRNANLYQCKNPAAALIAQIRGFIKARDVFLQKYICEMHHKGYVHANFNQTRSEEGDGTYTGRFSVTDPALQQINKRNKAMAAIVRACFIPDPDCEWGCFDWSQKDFRMFAHYLNDPRINEVYVKNPAADFHGITATITGLPRDRDQKTGGANAKQMNLGLIFGMSAGRMAKEMGLPYTRNEKGFYVAGPEAQSLFAKYHDNIPGANRIKESVASVARSRGYIKTQLGRRLRFHNDNAYKAAGILYQSQAAESMKVKTIELHKLVKDRGARLALLVHDEFDLSMQFGRQKILDSNIKELLEDFTGIGKYPLEYRIPILTEYGLGINWYEASL

SEQ ID NO: 5 - protein, 803 aa, Unknown
  IMGVR_UViG_3300020069_000003
MIEPSGTLVGDVLLPELPPGTWVAYDTETNGLHPDGDPGTDSGDPGSPPARVATASIAYRDPGDPGRILKYAWGFDQGPHPSKDGRIRRPREGGGVEPLDVEKLLANLAKAGYNNGWRDQIGKNGKPLKTRLAVPWTVEQSYEAVGLDSWLRLLAWLQRRDQLVMHHRKFDEWMTWVGPRNWRIRHEWVHNPALRQTVQQLGVYDPELIDQLMADDPDRDVGGWFGADLDLTADGHERPVRGIWDTMLVQAFFDPDQSVALKKSAKRLFGVDADADQKALLAAMGKQGTGLTKRYDLTPWKIMGPYAATDPELTLLLAENQLRRISEGDHPGDSRFPQHPHLRNPNLVWDQIDKEFELSRVLLKMEKRGVGYDVQTSKLGARRLQAEMERVRQTIPYDPTKLDEIRRFYFAPKSEGGLGVMPLKLSEKTNVPSVDEAQMRLLMQSGHPGAAEYDQWSHCKSALGKWYRGWADRTGTDGRLRTSFKQCVMAEERAGAKPGGTISGRLAVGRVQLQAIPHNGQLPEVVRDIPVRDLIHARPGHALWEMDLPQGEVRIATVVVNCRAMWDVIDSGEDLHGANAKRIFGVTEDDPRFKDLRGVAKRIVFGTLYGAGVRTLRKQILEFTGIDYSEDETREAKQAFEHTYPEFPRVARQIQRKADRTLGGAGYVNLVDGRKRWFGPDEFGHKAFNAVIQGGLAQSGKTWMIQVERQLPGIQVLAIHDSIVVEVPDNEAGAAQAAQVAAIGKQVYERDYGTRGRTMYFDIVPERWDEKEPPAPTGLADKVRAQLAEHRANSVEGFRQLTS

SEQ ID NO: 6 - protein, 635 aa, Unknown
  IMGVR_UViG_3300027711_000004
MIETLQDFPVVSIDTETTGLSWTSEKVFGVSISVPWCTLDQLIADPVNAPIKNIYFDTRQDPDRYEAFRQVAPLLGKMCFHNAKFDLHMLMNDGVLPNPRNVECTMIRASLIDEHLPSYSLDSLAHQYLGVGKATDIYDELAAIFGGRATKNVQMPNLYRAPVELVRRYAETDTEITLRLWAWQQGEIERQGLAQVWELEKRLFPHIFKMERHGIRVDLDLAQLQAERLEEAADRGLLELEKIAGFRVNPNPSSDMVKLFKPKWDSARKCWVAIDGTVLATTPAGKPSMDADALRAMSHPAAAKILEVRKMLKTAGTFIRGHIIEHEHRGRVHPNINQTRGDGTGGTGTGRLSYTRPALQQIPSRDQQVARQVRPIFLPDEGCGWSYGDLDQHELRVFHHYVNNPGVVKTYRDDPNTDGHQIVADMTGLPRNPPATGGPNAKQLGLAAVFNMGQGEMASEMGLPYTWESFEDKAGRVVEYKKPGPEAQEVINHFYETVPGIKELASKATAVARSRGYVRTMLGRHIRFPGGQFTYKASGLVYQGSSADLVKLDIINTCEYLESEVPGGALLLSIHDEQNVSIPWNGDAARHMGEIRNLIQERPGCPVKLRIPIRADFSELGKNWWDATQKGSIHK

SEQ ID NO: 7 - protein, 621 aa, Unknown
  IMGVR_UViG_3300027784_000143
MLVTNCNEFEEIIKEAEQAEEVCYDLETNGLRWDLGCRLVGVALLVPHNDKLSTYYVPFRHTDPEAPFERWKLEHSEENLPLEELRKLNRVFADSDRATIGHNIGFDTHFTRIEGVKTPETPIDTQIGAHLYNENDSMKLENLAQKYIIGNSEFKKFANLLPQKADGPEEKMCKLVYERMKERWGERPKKSEWKRYMAVLDPAEVAPYAENDVLLTYLLRSFVEEELEKRGQLELWYEYCEYLKPCVAMEEYGLLIDVEQAEKNLKVARKKAKELKERSREITGIDDFNPNSPKQVCEYLDLDSSRKAVLGRLGHELAGVVLEYRQWARARDTYFLPYLEHLDHNSRVHTSLNITGTISGRLSSSSPNLQALPKKEDNYRVRDVVVAPPGFKLVSADYSQAELRLLAHYTKADVLMDVYQNSKDLHDETAARIGVPREIAKRINYGIIYGLTAHGLQKNEDLTISKKQAKQYLEQYHQRIPEIRAIRRQAEKLAKRRGYIEFWTGRRRHYEQRWQTDKALSNLIQGGVAEILRVAITRLHHLLRQTNVRMILQVHDELLFEVPEEELDYWLPRIKETMEDFKFNVPIVADLSVGDSWASESLEGWEPNEVETSVEKANSGV

SEQ ID NO: 8 - protein, 701 aa, Unknown
  IMGVR_UViG_3300028596_000021
VSPLRDDLLPSQLPDPSDIPGTVFLDWETSGLYPDDGARIASAGVAFRFRGEVVSFAWPFNQGLYGKPEIETARFGWEEGREITGYYVNDSPKTGAKKGDPKYRNTKRKLTAEEVLPPNPNLGPTEWNALTAWLLENDIAAHNLMFEIVMAGYGVNPEMPGVDLMPNGVWCTFLGNHLLDPQHKKGLKETADRLYGEAPDEQKVLTDHLKERGVPAKRYDLADWDVIKPYLLGDVRKGIRLALHQYLRFRGHEARMARMHEHIRELDCFVRQERRGVPYNATESLRWADKIDAAADELEKQIPFRTTNPGAVQFYFTKDVLEDGTHCLGLKPVKMTAPSKTAPLGNPSLDAEVLEQLDQRDVPHARKFYRLRQLKDANGRYYRGYAEALGPDGRLRTRFRQVGTATGRASCERTNMMAIPHDHRMLAAGAAILLEAPSPRALIEAPPGFELWHMDLMQAELRVATQFARCVRMWETIEQNRDPHGETAIGLGLVTGPEDPGWYKGRSVIGKRSNFSLIFGVGHRTFRADLRKQSGLDLEVPDHVCVTGKRGCTRRNCKVKELVEAWHELYPEFRPTIDTYMNAAEYDHRVLVRGDQWRYFTDVEIAYHDFHKAFNNKVQGNIGMFTKRWMVEADDLLMSRGIPDDAGLLLQIHDALLVMLPTGMRDLAEECADIARQMWTEWFEIPGGVDVEPWKKERVAA

SEQ ID NO: 9 - protein, 601 aa, Unknown
  IMGVR_UViG_3300031623_000025
MTDQLLRRLSTAEKVVLDVETSGLDWKSNYAVGYVFTFSSNPSDSFYIPVRHRSNNVDNFIPPEEEKCVSPKPHPFEMDINSIFKSKPIHIIGHNLAFDLKFLHRHNIDLSKCTFEDTMVNAGLINEHRSSYSLENCCIDAGVQPKRGGELYQYLKSQFGGNDGSKQMANYWRLDGQDDMGTEYAKGDGTSTYQLWEQQQKDLDDQDLRRVWSLENKVIRVLHRMVVRGVNIDEQRLVDVSKLVEQRLIEANESLPKDLNIRSGAQMKALFDKANITDYPITEKGNPSFTENYLLTNEIGKKIVAARKYGNLLNSFISPMNTHIFNGRIHTEFNQSRSDHFGTITGRLSSSRPNMQQVPKRNKELGQLFRSVFVPDEGMVWGSVDYSQCEPRLLAHYSKCKVLLSGYLSDPPIDAHTAVANAAGIDRDSGKRLNQGLLTGMGKAKLIVELGVSEAQGEKIWNDYFTNMPEIKVLQKTAANKMKSVGFVKSIMGRRARLDKRSNYDMSYKAINRLLQCGNADIIKEAMVNIDNYLEANGDKVHMLLSIHDSIDFQFYEDDRQDFNTAIEIMQDFGPKKSIELQVPMVVDVGEGKNWSEASYG

SEQ ID NO: 10 - protein, 621 aa, Unknown
  IMGVR_UViG_3300031539_000263
MFDLGRYKYVGLDTETTGLKYPKDKAFAVSVYAPSGETASFDFRSEGTDRFAEWVRHYNGTFVCHNASFDCRMLTSSGVAIPPSKFDCTAVRATLINEHEATIFPWTRKPGNFTLDDLCSKYLGMRKTEDVYIRLAELFGGLATRNVQAPNLQHAPWDLVKEYQDRDAMLALKLWEWQEDEITRQGIREICEFERRLIPIVIQTEMAGVRVDLEAAEKAQKPLTRILKRQQTKLNDLAGRNLNVNSPKQIKEMFQPEQKEGDWYIGGYQIGTTPSGGPSLAGEILKGMPDERAQLIGEIRSIIKTRDTFLGKHILEHSHNGRVYPTINQTKGEDGGTGTGRFSYVDPALQQIPARNKQVAAQVKPCFLPDEGQVWLDSDLASFEVRIFAHLVAAFDNRIAQRYAANPSLDFHQMVADMTGLVRNATRAGEANAKQLNLSMIFTQGNGATADKMGMDWEWNKFLPSGAIDEEENYIRYKKAGPAAMAIIDRYHLELPGVQALAKQCKKIVAEHGYIKTAEGRKLRFPKGYKNYKASGLVIQATAADENKRNWMLIDEVLEEGRLILNTHDSYGLSLPEDYHSEWARVKNAVERDTLRVPLLLDFNGVGANWWEALQGDGNAH

SEQ ID NO: 11 - protein, 648 aa, Unknown
  IMGVR_UViG_3300021411_000002
MLPSQLPDVDQPVVWDTETSGRYPDAGARVSVVSVAWTDPDTTQPRAYAWPFSQDLHGKPEAERIFRKKRLGDQCGPDPNLPPDEWVALTGWLATRPGLIAHNGLFDAILTEAGTCPPRHQSGVNLSGLVVWDTMIGQRILDPEHDIGLKPVIKRLRGIEDTEKEVLVKHLKSRGYGAKTNLRYDLADWAVMEPYATWDAVQTLWLARNQWERFRDGEAKFSQMTHEMEVLRTLVRMERRGVPYRADESLQWAQKLQVEIDRLNVELPFEDKPNAVRQFFFGAGQTPKGATCLELRPIKMTKGGQTAPVASVDAEVMRELAEKEIPAAQLYRETSLLTDANARYYRGYALAVGADGRLRTRFRQTGARTGRLSCERTNLQAIPHDHRLLASGNLVLASAPSPRALIYDPSGWRLWHLDLAQAELRVASLYAGCERMLQLIREGRDPHGETAIELGLAPGPDDPTWYKMRGVGKRGNFSLIFGIGPDKFRADLKLQVGVDLGQTRTRKLVQDWNALYPEFKTAIYSHMHHAERHGWTPIRDGIRRYYSLAERAYHEEHKAFNSKVQGNLGYFGRAWMVEVDRLLMDAGVDSDTAGLLLNIHDALAIMVPDTPEGEGLVQQCAQIARDLWVQWFPGVPGDVDVAPWSKAA

SEQ ID NO: 12 - protein, 647 aa, Unknown
  IMGVR_UViG_3300013444_000001
MEFPNTPIDFPEFNRDHPAAQTPLGLPRPSEIQGPIFYDTETSGLHPDDGSRVSVVSLAYQVKGDPVPRSAAYPFGQGPDNELDLGRRAWNHLIRWMSTAGSGLIGHNIRFDIHQMAGRSIHGYPGRDFTDRVIFDTMVAAPEVWPRGPIALKKIATRLYGHDADEEQKALKPHLGPKSNPRFDRVPWEVMYPYAIRDAELTWAVYFEQRAWLDESTLTGRFIPQEMDIVRCLLRMEQAGLPYNPTQSLEYARQLHESMDRIQQHVPYEIRPKMLRQYYFGEGEHDLGRGSEVQCLGLPPYSTTATGQPQLTAAVVRSMVDDEVPFARDLQEYNRFKSAISKWYEPFAQRAGEDGRIRTSFRHTGGTKSGRFSATRINLQAVPKDYALHLPVPTPRQVVADTVRALPAPPGSDHWELWDLDLEQAELRLAALDAGCETMLDHIREGRDPHGETAQDLFGLKPGDDDWDMFRSIAKRANFSLIFGSGPQTFQEMLANQAGVKMPLRQVRRIVYDWRDLYPEFGRAIEEHMAFAEKHAFVEMTTGRPRYYAPGEDRHSAFNQRIQGSLAEYGKRWLISTDRLVRPYREIGRRLGIGYSGLLLVVHDSQVMLLPASDAAHVVDQVCENARVIWADMFPGVPGGADSDRWA

SEQ ID NO: 13 - protein, 597 aa, Unknown
  IMGVR_UViG_3300012018_000006
MDFNMSIIQQASDRLSQADSVVIDVETNGLDWRTCVICGYVLTFGPREEDSLYLPVRHETGPNLSAYRVWEMLLFHQNRPRHWVGHNLAFDLSFLHAADLKLNGTFEDTMINAALIDEFRRSFSLESCAEEAGVQAKKSTEILDHIANTFNLKHSKSLMGSYWRLPADDKMAVAYARGDGTTTWQLWMTQQEKIREQELETVHKVECDLIPVLNSMTMRGIRVDQTRLNKLHDVMGKIKKEAHAAIGGINVNSSQQIKKYLTDEGVSGWPTTPAGNPSFAEEYLSTIEPGKKILAVRKATRFLDAFIDPMINRHLYKGRVHSSFNQLKSDSFGTVTGRLSSSNPNLQQVPKRDKEIGILFRSIFLPDEGMEWGSADYSQCEPRLLAHYSRCKVLVDGYTKQPSVDAHTAVANAAGIDRQSGKRLNQALLTGAGSRKAASMLGKPMAEAEAIVEAYFKAMPEIRDLQAMASAVMRKRGYVRSILNRRSRLEGHGYEYKAVNRLLQCSNADMIKSSMVKLDELHSIHGGIHMLNNVHDSLDFQFFPDKRPIYQESLRIMCDFPQLRVPIEVDEDTGPDWAWASYGEEDWKKYMTKHEMI

SEQ ID NO: 14 - protein, 612 aa, Unknown
  IMGVR_UViG_3300020179_000002
MNIPRIDGQIPYLVVDTETTGLKWWEDEVFGVSIALPDGTAGYWDVRATPKILNWLSDLIAEDRVGVWVGHNFKFDLHFLREARVRIPTDRIDCTMIRAALINEHEPTYGLDFLARKYVGAQKDTEIYDELAKIFGGRATRNAQMPNISRAPQEVVARYAIQDAVVTRKLYLWQRDEIEKQNLHRVHNLERELMPVIIDMETEGVRVDVDMAERASRHLTKRINDMQRDLNTEAGFEINPNPSGSIAELFKPTLGEDNEWYLIDGTRAGKTDGGKASIDADCLRRMKHPAASMILDLRKMLKTRDTFIQGHILGHQQDGVIHCNYNQTKNDAEAGTGTGRLSITNPALQQIPSRDVSIKSLVRPIFKADHGAKWLGLDWSQFEFRVANHYGQVPSILEAYRANPNLDFHQLVSDMTGIPRNAQYAGGPSSKAINLGLAFNMGSGRLAQECGLPYTEETGPNGNAYLKAGPEAMELFERYHAANPGMRNMASKASSIAKERGFVHSIMGRHIRFPGGQFVHKASGLIYQATSADCMKMKLIELHRYLTGHGVGRLLLSVHDEVGISLDKDSLNHAEKIAQIYTTFNGIDCPIKLRVPITCDWGLGEDWYEAKG

SEQ ID NO: 15 - protein, 615 aa, Unknown
  IMGVR_UViG_3300002460_000043
MRAADSMSIDRMFKAVKASKELVFDIETTGVDWKRHFAVGYVITVGLRPEDTYYVPVRHGGGRNISKGHTPDGPEDVGPRVLPFEKRFNAEIASRTDLLVVGHHLKFDLHMAANHGIIFNGPLECTMVNAALIDENVGKYSLADCAKRAGVTAKLKEEINQHIAEKFKLDPKDRGLMAHYWRLSGDDKMAIDYASGDGVTTWELHKWQQIQLDSQDLRRVWAVECRVLRTLFRMERHGVRVDESRLLQLKEEMEKKLEKALTALPENMNVRSAPEVRKFVRDKLGRTDFPLTPKGNPSFPEQYLLTFEEGRRVIAARKITTIINSFITPTLDRHLWKGRVHCNFNQLKGDEYGTVTGRLSSDSPNMQQVPKRDKELAPLFRSVFVPDEGTKWSTNDFKQQEPVVFTEYTQCKALVKGYNSDPPVDIHSVVAKMIGVERDPTAKRMNMGMLNGMGKKLLAKHLGVDIDVATEYRDQYDRAFPEAMAFMKSAERRAVARGYVKTFLGRRRRFPRGEFAYKAGNSVVQGSSADITKVKMVEIDDYLKSVGRPYQMLLQVHDSLDWLVEEGARGQTINGECLKIMQDFGPDQLVHLVLVPLRVDGHVGDSWGDAIFGED

SEQ ID NO: 16 - protein, 606 aa, Unknown
  IMGVR_UViG_3300002077_000001
MPASFFGEFMKQLIDPQLMLYIVKCCNNTIAFDTETTGITVKDQVCGWVITNDEFSVYVPVRHEAGGNIPDATGFEFELAQAFKERGRLGYRTVGHNLGFDLRISLRHGVVLRSPLEDTMINEAIISDITQGYSLDECCLRRTVTAKKGTAIYAELARRFGGIPDRKQMKNFWRLPGDLPAVVDYATGDGISTLELCQAQQKILDSDDLRKPWKLECDLLPYVARIHNRGLKIDDGYSSRIMDDVKAAVGEASKVFVPGFNVRSSKAVEQLYRMNGYTDDKFARTDAGAFSFTEKWLATNSIGNSILAVRRLEKARDSFITPLIDTQNINGRVHPILNQSKSDDYGVAGVRFSCSEPNLQAFPKRNIEVGRVVRKLVVPDEGFVIEEADAKQQEPRLFTHYSGDPALIEGYRNGTMDIHDRASELLNLDRDTAKRMAMGMLTMMSPPTLAGHMQWPLEQARAAHRMFLTDAFPHIKVFQDDAVRVFKRRGYVRTLLGRRAYCDNPQFAYRAVSRIIQNVGGEHLKICLLRACQYEDAYPNDLQVLLTIHDSLLWQRNPNHDVMDLIRSVEGVAQELGLIVPIPFDVGSGSDWARASYGFKLDRYED

SEQ ID NO: 17 - protein, 566 aa, Unknown
  IMGVR_UViG_3300005663_000317
MQWLNDTFSSLGTKCRIICHNAPFDACMSAVAGIHIPLELLDDTVIRACLINEHEATVFPWNKHKKPGGYSLDYLCRKYLNRGKIEIDVDNIADLPYEEAKEYAVEDAILALLLWEWQQKEIKKQNLYQISETIERRCMPKIIKSQMRGIRVDLDEAERAMKAMTPHIKSLQKQMNRMSGWDFNVNSSPQVKELFAPRRRGKSWFVGNVKIGTTDKGAPSFRKEFLEELSEVDPRARQITDIRSALKTRDTFLAKHILEHAIGDRVYPTINQTVRETGGTKWGRLSYVEPAMQQIPNRDKVTAAIVKPCFLPDEGQVWVDNDLHSFEVRIFAALAGMYDNHLVKIYQDNPRLDFHQWVADLTGLVRDAEFGGQPNAKQLNLSMIFSQGKGATAAKMGLETTDDEFEDEWGETIRYQRAGPDADYIISQYHSKIRGVGELAETARDIAERRGYLRTKYGRHIRFPRKYKSYKASGILIQATSADINKENWILIDEALDGRGRINLNIHDSYSLSCDEDKWEDTNSDVKRAVEREFLGVPLLLDFNGMGRNWWSALQNEGIESVITAQ

SEQ ID NO: 18 - protein, 738 aa, Unknown
  IMGVR_UViG_3300025916_000016
VWLPDLPPGVQVAFDTETFGLYPDGDPGGDSGDPGSPPSWISAASIAYRDPDTGHIASHAWGFDQGPCPDKPGRVRRPREGGGVEQFDPAKMLATLAKYGYGSREFTGADFQYEMNKKGTKVRKTTVTNVQRWVPWTWQEAYRSESLESWLNLVRWLRDRPQLVMHNAKFDMTTTRLGLRPEVVARNIAADPELYLGIDPGDPARFSLDLDRLADGTLRPVRGVWDTMLVQSFFDPRHPVALKKTGKRLWGDRSEAEQQTLLDAMKRQGVGLTKRYDLTPWPVMEPYAAKDTVLTLLLEEHQRARIASGDHPPCLWEQIDKEFGLMRVLYRMEGRGVAYDVAGSESGARLLRESMSGIEARLPFDPSKLASVKQFYFAPEYEGGLGIVPLKTTEKTGQPCLDEAQVRILVNQGRPWAAEYDEWSHCRSALGKWYDGWAKRTGADGRLRTVFKQCVVAEERAGARTGGTISGRLAVGRVQLQAIPHNHQLPEPVRHLPVRSLIGARPGHCLYEMDLPQGEVRIATVVVNCSAMWDVIDSGADLHGENAKRIFGIGEDDERYEAYRGVAKRIVFGTLYGAGVRTLRQQILEFTGLDYSEDETREAKQAFERTFPEFPRVARQIQRKADRALGGPGYVRLIDGRRRWFGPEEYSHKAFNAVIQGGLAQTGKTWMIEVEQQLPGIQVLAIHDSIVVEVPDSDYGEHLARQVAAIGKEVYERDYGVRGRTMYFDIVPKRWGHK

SEQ ID NO: 19 - protein, 577 aa, Unknown
  IMGVR_UViG_3300006641_000016
MNLPNSIAGENFVLDTETTGLNIMVDTPLYLGWRLPGKHGTVRWSEGLVNWLNDHLPTAKVVVAHNAKFDCHMLIQGGVFPTVIDYTPVYCTMVGEQLCDEHRLSYSLDDLGHDLLNMRKSSSMYHVLADKFGGKPDKSQLKHLRHAPLELIEKYVNQDTHICQCLFSRQKDEIPKQGLGRISEIEQQVVKVLMRMERRGAPIFKDRAEQAIYAMRDAVDVADDDLWACVGYRTNPNSQPALRLAFEMLGLPAMDSFDKDHLALVDHPVGQKILDYRQILVTQNTFVEGLQEFIGRDGRIHCNFNQNKHEDGGTRTGRLSATKPNLQQIPMRVETVAKVVRSLFGEKGRGWCAGDWSQFEYRIFAHFVGDENVLAAYRNNPATDYHQALADITGIPRNKAKRVNLGLVFSMGEGKLAKTLGLPCTEYVEDGKTRYQPGPEAQLLFSQYHSKVPKTRPYLKASTQEGEAKGFVRSLFGRKIRFPDRNKAYKAGGLRFQASAADLMKQKLIEVDQALMCSGIGSELILVVHDEFDVLSPEGEEEKTCKLMKEIMEDIPDLQVPVLADVSHGHDWWEASS

SEQ ID NO: 20 - protein, 642 aa, Unknown
  IMGVR_UViG_3300032829_000012
MTARPKRSWPTTGAPDETLQTVLNRLKDPTQSTRCLDVETSGLDWRNNAIVGYVVTFSGDPRDSYYVPFRHAGNANVGGRDGLKSPTGWDGKLLPGEKELVTALDQPGTLMFGHNLAFDLRFKARVGFKFQPKFEDTIINEPLLDEYATFSLVACAARHNVQAKKGTELYAYMADKLGEKNDKNIMGHFWRLSGDDPMAVEYACGDGTSTWQLRDAQMVEIQAQELGRVHAVESRLIPVLARMMVRGVKVDEERLEWLIGHIDDEVEKLKNEFPPDFNALSPTDVQAWMEKHGHTDWPRTAPSRTRPQGSPSFTSHWLETHEAGRKIIKLRKWENLNSTFCHPLRDRHLWHGRVHCTFNQLRNDEFGTVTGRLSSNDPNMQQVPKHDEDLGRLYRSVFVPDYGLWGERDYSQIEPRLMAWYTRARVFLDDYRNNPDADSHTAVAKDAKGAAWDDMSPAEQKHFRNTWAKRVNQTVITGGGKNALIKKYKMSEQEAMQALVRYFRTVPELKPFQKKAARLFRERGYVRDVLGRRAHLRDPDKDYTAMNRLLQMSNASMLKLKMAEVQEYLDSEPQAQVELLLNCHDALSFQFALDKRSRAAYAECKHIMEDFSSDAAMVKIDLPIKVDEGDGPNWSVATYGED

SEQ ID NO: 21 - protein, 600 aa, Unknown
  Station175_SUR_ALL_assembly_NODE_2419_length_33154_cov_10.289284
MMKSHSNIIERIAKAKEIVLDVETSGLDWKTNYTVGYVITFSGDDCDSYYVPVRHRDNDNAPEGPTAGLLYPHPFEISLSQVLKEHPTHIIGHNLAFDLKFLTRHYVDVSKCTFEDTMVNAGLINELRRSYSLENCCIDAKVQAKKGGPLYRYLSERFGGQDGQKQMGNFWLLNGDDEMGVDYAKGDGTSTWQLWQEQQKDLDEQELRTVWEIECRTIKVLHRMMMRGVKVDEDRLRNVSVEVKSRLHEAESELPDGLNMRSSTQMKKLFDDAGITDYPSTDKGNPSFTEKWMSTNDLGKKVVAARKYGNLINSFIAPMEEHLYEGRIHTEFNQSRSDTFGTITGRLSSSRPNMQQVPKRNAELGNLFRSVFVPDEGMIWASVDYSQCEPRLLTHYSKCKVLLAGYLSEPYVDAHTAVAKAANIDRTSGKRLNQGLLTGMGKAALVEELGVSQEVGQAMYDDYFKKMPEIKTLQRQAAARMKNAGYVKSIMGRRARMDLRGGHDTSYKAINRLLQCGNADIIKKAMCDVDDYLEAHGDTVHMLLSIHDAIDFQFKEVDRHIYEGAIEIMQDYGPDKSVELLVPMIVDAGEGKNWAVATYG

SEQ ID NO: 22 - protein, 589 aa, Unknown
  IMGVR_UViG_3300024999_000173
MTRELFFDTEGTGLNMISGADRATDISYAMGDGPVKYVDLRADSPEEFIKMVDDAEVIVAHGTKFDAHSLRTIGIDISNKNLDCTLVRAQLIDEHKLTYDLDSLTGMKVNIIDDLAAMFGGRATKNVQMPNLHKAPRDFKEKYAVGDVLAMRSLYRQQEGKLPPVHALEKEVLNILIKMEQKGIRVDGDRLDKAKRDVQRLIDRTQKELNEMAGKEVNVNSTPQMRDLLIATEVQDGRVVPKTKAGKCVLIDGTLADKTKTGGVSLNAETLEEMSHPIAEAILKVRKYRKIHDTFIVSQLMGHQTRGRVHPNFNQTRVVTGRLSCNNPNLQAVPKRDPEMKAILRPLFLPDDGAQLLKCDYDQSDVRGFAHYIYSVTNDKNHPILQAYQKDPDTDFHTFVSELLGIRRNPGPGGGANAKQINLAMIFNMGMGKLAKQMGLPYEEEIGRNKKVYLKPGQEAIDVFNMYHSKIPGAADMAQMASSIAASRGYVTSICGRHLRFPDKRFTYKASGYLYQSFTADLIKKAMVETAKIVVPQLSVHDELLFSIYDKETAFAIQKVMQEVFANLTVIPIRTKPEVGRSWGEVNFI

SEQ ID NO: 23 - protein, 723 aa, Unknown
  IMGVR_UViG_3300028585_000007
VPLPIQEARRTGTILPSELLEAYVHAWNIESPVAVDTETSGLFVDDGARVSTVSLAFADPLGVWANLFEGRSCEGALDGWFTYRVEEVAPGYSVPVASFAWPFDQGVSFTDKPEDDGYATMWPDAENLSREEWAALFEFLRLAGQETGLVFHNAKFDLHMLEAGTRRWPGLGWDLSRLVVADTQNTVALLYPTLALVSRMGKLAPTTSLKPNSAAFWGEAETDEQKVIKDYLRRKKLPNGRWDLMPWDVIAKYADQDPRLTLRIHLRAEHDIQQGLVGTWLTGTGNKLSIQQALDRRLDTTKFLYRMERRGLPFDTQGALVASKELRYRSAQIEDLLPFSPATLPRAKQYWFGDRDEGNLGFPPYAETDKGAPKVDGTVVDYMVRDNIPGAKEWKDLQKLATADSRWYAGYADLAGSDGRLRTSVRQNGTVSGRFSVERVQLQAIPQNYKLSSFTVLDGVPTPRALIGSGISSGWKMWELDLAQAELRVAAMYAKCQTMLDLIDQGADLHGETAKQLFDISPDDPRWDQMRSVAKRSNFSLIFGTGWETLQAAIEEQVGIRLSDAEAESLVRDWNRLYPEYKRAIYETKAVVERRMRSPQHGRGVGWIDTVNGERRWFVPGEDTHKAFNQRVQPNLAQFGIDWWLKVERRLVKKFGDDPVTLDGVYVGRVGMVMTIHDSMVLLLPDTPESLKIVEHAQNTGRKLWAKRFPGVPGDIDAKPWNK

SEQ ID NO: 24 - protein, 634 aa, Unknown
  IMGVR_UViG_3300006846_000024
VPTAITDQLPDRSGLIVAFDTETSGLFTDEGARPAIVTVAWGDPGAIQTRCFAFDQGVLDKPDAKGLQASFFDDAPNLSEAEWVELCQWLRRQRLMAHNVKFDLLMMRAGHRKYEQGVDLSNNVMWDTQVVCPIIFPGHPTGLKPTCERLWGETERDAERRLAQWLKKHKDARGNPRYDLAPWDLVAPYATKDVEQCLRLYHHQRSLIDEGSVGEPFELIDREIDLAICLYRMETRGVGFDVEACREAAAKLRRERDFLRLQLKREWRRDPTPAGARWWFFTKQAAEPVSWTEGKNPVPSVDQDAVRELRARNIPGAAEYEQLSNLSSALTKWYENWPELCGPDGRLRPSYHQTKADGQQGSGRGTISGRLSVERVQLQAIPHDFRLPAGVPSIRSFFKAKPDHELWEVDISQAEVRVATHCAECEPMRQVLLAGDDVHGQTAIRVFGVSPDDGDWSKWRTLAKRLTFATLYGAGPRKFRQTLKEQGDIVVPESQAREWLDDYRATFPQFVKLYRDQEYRVKRFGYVQLVTGRRRWFSDMERSFHPYKAMNQLIQCNVAEVMKIIKVEVEYEYPGLMLNEIHDSLMLEVPAGEEGMALVKLVVALMEEWLMELFGGWDKDHIIPWKVDAKPWAA

SEQ ID NO: 25 - protein, 766 aa, Unknown
  IMGVR_UViG_3300025526_000004
MTSNKIYPSDLVALRRRGIGPRGPVAFDTETSGLWVDAGARVSTVSIAWILSDDEVPQWYRILGQGEDGQYLWDDGIWTLRKEPGPWAGTGTWPGGAWTEEVWVLSFAWPFDQGAMGTGKPEDRTLALEQSAKQGLLGELEWEVTPPEPDSFNLGWGEWQALTDWLWDIGSFLGLVAHNAKFDLHQMQAGVRRWPGNGVDLLPWVIWDTQNGADLWTSWRLGGIGRSTTSLKPTSAFLWGEDESDEQTVIKAYLTKHKLPAGRWDLMPWRVIAKYADDDSRKTIRLYEWQKAEQGRVSWADAHQTKGGGVEKGWTAGHTGRMMNRRMEVTKMLTRVERRGVPFSAEVAREASQTLETRIQEVEATLADTLGGKVTLDMAKHYWFGVGGKSGEAGRLVQGLGLPDYGRTELGSPIVDQAAMARMIRDGVPLVEDWSAYKKLIDAKSRWYDGWTDRVGQDGRLRPGFRQNGTASGRFSVENVQLQAIPADYKVRKVLEGVPSPRDLIGAGVPEGFELWEMDLAQAELRVAAWMAKCDKMLDAIERGLDLHGETAKALFGIDESHPDWGMYRQVAKRSNFSLIFGVGWATFKETLWKEAGIDMAEPEVRKLIRDWNALYPEFKAAIHRHDRQVMERYHKWGVGWLQMKNGERRWFTKNDVEFFDKEQDRWVRDGAHKAFNQRVQPSLAQYGIDRWLVEDRYLRDRYGAGGEERGMGLVLMVHDSSVLLLPEGDGEKVCADFRQLGKELWEEWFPGLPGDLDASRWSEHA

SEQ ID NO: 26 - protein, 594 aa, Unknown
  IMGVR_UViG_3300027782_000336
MSLIDDVSNRIEWASEIVVDVETTGLDWRTNQICGYVFSFGPHQEDSLYLPVRHERGPNYDAATVKAMILSHQKHPRRWIGHNMAFDLGFLHAEGISLNGPIEDTMINAALLNEFRRSFSLESCAEEAGVVAKKSSEIKAHIEKTFNKDFGRNYMGQYWRLSADDPVAIEYATGDGVTTWQLWENQTHDIDKQSLDRVHKVECDLIPVLNRMTMRGIKINVDRLHRLRVVMAETQQRAKESLGEEVNVNSSAQILRLHQKHNLSGWPTTEAGNASFPEEYLRTTDIGRKIVAIRKSTRLLEAFIDPMIDRHLHNGRVHATFNQLRGDTYGTVTGRLSSSNPNLQAVPKRDEDAGTLFRSIFIPDEGMVWGSADYSQCEPRLLAHYSGCKVLVDGYNQTPSIDAHTAVAKAANIDRQSGKRLNQALLTGAGNNKAALMLEKPMDEALKIVDAYFNSMPEIKDLQRDASRLMKKRGFVFSILGRKSRLERKGLEYKAVNRILQCSNADMIKISMVKIDQMCTEMGGIDMLNNVHDSIDFQYVEGNEGAYKKALEIMCDFPEIRVPIEVEEDSGPDWAWASYGEKTWQKIMSDRGMI

SEQ ID NO: 27 - protein, 616 aa, Unknown
  IMGVR_UViG_3300005600_000023
MFPNILAFPEFSYDTETTGLNPMAGHRVFGFSISTPDGKDYYWDIRQVPQAVEWFNRMMSMFTGTIVCHNLSFDYRMSKVTGINLPLEKCVDTCIMASLVNEHEHSFSLDNLARKYTNDWKKGDQLYQDLADMFGGRATKNVQMSRIADAPANIVAPYAKGDTRSTLSLYYYLKEQIKYQGLERIVAFENSLTPVMIETEMHGVRVDIPKAEQAVGELTTVINAMQKQLDEVAGFKCNPQPSGDMKKLFKPEWREGRWWACDGTPLEETKSGNASLGADAMRAMSHPAAGIILELRSMIKTRDTFLVGHVLESAQNGRVYPNINQTKGEDGGTGTGRLSYTGPALQQIPDRNKKVAEIVKQVFLPDEGHSWIDADLKSFEVNIFAHLVGTPDILDVFAKNPETDFHQFVADLTGLPRNATYSGEPNAKQLNLSMIFNQGNGTTAEKMDMPWSWESFTPKDSKDGKEVVYKKAGPEAMAVIERYHEELPGVRKLADGCKATAGKRGYIFTRSGRHLRFPNGNKTYKASGLLIQATAADENKRNWLLINEALSGSYGKMLLNTHDSYSLSLPIGEEERLAKRVKEAVQADRGLRVPLTLEVNHPGRNWWESKSSDRWM

SEQ ID NO: 28 - protein, 623 aa, Unknown
  IMGVR_UViG_3300020436_000172
VLCKSMEDCASLLRRLTSPETTELVIDVETSGLDWRTNYSVGYVFTFGTDDGDNYYVPVRHNGNNVGGYIAPATADFDLPIPTHQFEKEVATIFKERGKKLRIIGHNLHFDLKFMAKHGINPVSNTLECTMINAGLIDEYRNSYSLENCCIDAKVSAKLGSELYAYMASKFGGRPDRKQMASYWRLDGLDDLAVEYALADGISTYELWKWQRRQIDKQELNNIHDLECRTINPLHRMMMRGVKVDEDRLQQVKKIVEDRLDKAMDALPADLNTRAPSQMVKLFTDHGITNWPVTEKGNPSFAESWLLTTEIGKHVVVARKYRNLLDSFIAPMDTHIWKGRVHTEFNQSKSDQYGTVTGRLSSSRPNLQQVPKRNEELGRLFRSIFIPDNGMVWASVDYSQCEPRLLAHYSNCKVLVDGYLQVPAIDAHTAVAKAANIDRTSGKRLNQGLITGMGKPKLIQELGVSETEGNRIYNNYFNAMPEIKAIQKHAANVMQDRGFVRSILGRRARIQYFSNGGSNSYKAINRLLQCSNADIIKKAMADIDDHLSGKGQYDPEECEMLLNIHDSIDFQYAKDDPYGPLLYRECLKIMTDFGPKRLVELRVPMDVDEGIGLNWAVASYGED

SEQ ID NO: 29 - protein, 597 aa, Unknown
  IMGVR_UViG_3300018481_000012
VKQCINPQLALDIVRVHPDTIAFDTETTGLTVKDKICGYVITNREFSIYIPVRHEAGGNIPNAEDFEQELARAFADRGRLHLRTVGHNIGFDLRICYRHGIVPRHPLEDTMINEAIISDINQGYGLEECCIRRGVAPKKGAEVYAELARRFGGLPDRKQMGKFWRLEGDHPVVVDYATGDGISTLELYHAQQRILDADDLRRSWRLECNLIPYVARIHNRGLKIDPEYAGKVVSDVNGAIAESSKVFVPGFNARSPKAVEQLYRMNGYTDEKFARTDNNAFSFTEKWLETNDIGQAILSVRRLEKARDSFITPLIDTHNVNGRVHPILNQSKSDDYGVAGVRFSCSEPNLQAFPKRNIDVGRVVRRLVVPDEGFVIEEADAKQQEPRLFTHYSGDPVLTDGYRSGTMDIHDRASQVLGLDRETAKRMAMGMLTMMSPPTLAGHMRWPLEKARAAHSAFLTDAFPKIKEFQDTAVHVFRRRGYVKTILGRRAYLDDPRFSYRAVSRIIQNVGGEHIKLCILEACMYEDAYPNDFQMLLTIHDSLLWQRNPGHPPNEIIKAIESVAQKLELNVPIPFGLGSGKDWARASYGDKLDRYDE

SEQ ID NO: 30 - protein, 572 aa, Unknown
  IMGVR_UViG_3300026290_000063
MLIDTADKLDRVIPSLLACTSPVVDTETNGLNSYGTSKADPHRIIGISVDDGREAYYFPFRHQQGTNLPEAAMDFFRRYLSDPHRTYGGFNYKFDQHMLKGDGVGYAPNYEDAMLGVHLLNENEPNFRLKDICNRYGIGDGSRQEETLLEKVKGRKDRMGELDPADVEPYACDDVRLTRGLLDLIRPALQHYELFDIWQQVNYYSYITTLMEHRGLMVDEALINQYREEAVAHKNDAFARLHAAAGYALNPNSSKQVCAFLGIQSSAAEELENLMASGHENADFARLVVEARGWSSVDSRYYTPYLNLMDLNNTLHCDLNLIGTISGRLSCSNPNLQAVARQTAVFKVKDVFIARPGYTLISADYSQAEMRLACFYANEQTMGDLIRQGADLHSSTAEALHIPRDAAKRINFGVIYGIGAEALHKQLRVEKKVAQGYLNKYHGMYPQFRKLIKACEQRAEADGVINMWTGRKRHFNVQHAYSHKAMSNLIQGGVAEMMRVAISRLFPAIRDLGGFMLLQVHDQVIVEVPDSVVDLACRTIKAIMEDFTFDPPMTVDVSTGKSWGKLEDWIPA

SEQ ID NO: 31 - protein, 624 aa, Unknown
  IMGVR_UViG_3300003876_000008
MEFPNLQQFDYFAYDTEDTGLRYKIDTLFGFSISTPDGKDYYYDVRETPKAVDWLNDSTVVYNGVIICHNASFDYRMSDHSGIYLPLEQLDDTVVRACLIDEHLFAYDLDSLGKKYLGKGKYGDIYRELADLFGGRATRNVQMPNLWRAPSAVVSPYAKADTRRTLELWEWQESEIDRQNLRDIVSFERQLMPTLIRAEMRGIRVDLGYANEAFEKLTPFLDEKQELINKIAGEDVNVNSSPQIKSIFNPIEVSDGVWHTSGGTPVGTTPNGGPSINAEILRGMDTPLSNAIIDLRSLLKTRDTFLAKHVMEHAIGDYVYPTINQNKGEDGGTGTGRLSITSPALQQIPSRNKKIAAIIKPCFLPPEGMVWCDCDESSFEVRVFADLIGNNEIVNAYRNDPELDLHQYVADLTNLVRNAEYSGQPNAKQLNLSMIFNSGDGAIADKMGMPWEPASFTKRNGDVVHYKKAGREAKEIIERYHRRIPGVRELASRDQKIAERQGFITTYFGRKLRFPGGYKSYSASGIRIQATAADLNKENWMLIEEQLGRDGEFGHLQLNTHDSYSLALPEDWKPHYKRVKEALEEEDRLKVPLILDWSGTGYNWQQALQGKDYAGRRNRTGNKT

SEQ ID NO: 32 - protein, 594 aa, Unknown
  IMGVR_UViG_3300027759_000295
MSLIDIVSTRISKAAIVVVDVETNGLDWKKNRIVGYVFTFGPLAGDTFYLPVRHASGPNYDADRVREMVLSHQDKPRHWIGHNLAFDLAFLHAEGIELNGSFEDTMINAALLDEFRRSFSLESCADEAGVQSKKATEIKAHIEEFFQESFGRNYMGEYWRLPANDPVAVEYAVGDGTTTWQLWVEQTKHIEEQDLNKVHEIECKVIPVLNRMTMRGIKIDVNRVHRLREVMGETLAKAQETLGEEINVNSPLQIFKLHEKHGESGWPLTPTGKPSFPEEYLRTTEIGRKVITVRKAKRMLEAFIDPMIDRHLYKGRVHASFNQLRGDEFGTVTGRLSSSNPNLQQVPKRDEDVGVLFRSIFLPDEGMIWGSADYSQCEPRLLAHYSGCKVLVDGYTKQPSVDAHTAVALAANIDRQSGKRLNQALLTGAGAKKAASMLGKPMDEAMAIVNQYFKSMPEIKVLQAEAANVLKVRGFVRSILGRRSRLQAPGFEYKAVNRLLQCSNADMIKVSMVRIDEMCRSVGGIDMLNNVHDSLDIQYTPDRERAYRDALEIMCDFPEIRVPIEIEEDSGPDWGWASYGEDSWKKIMAAKGMI

SEQ ID NO: 33 - protein, 614 aa, Unknown
  IMGVR_UViG_3300025635_000557
VSSGGISSNRIIIMNVVDVVAAHLSKADRVVIDVETNGLDWKHNHIVGYVFTFGPTPEESFYIPVRHATGPNFEPTSVRNMIISHQTRPRHWIGHNLAFDLGFFHKEGIELVGTFEDTMINAALLDEFRRSFSLESCAYEAGVQAKLADEIKQHIETTFGQSFGKNYMGQYWKLPADDKTAIDYATGDGTTTWQLAEMQAEWIDDQQLDVVHGVECKLIPVLNRMTMRGIRVDEERLHKLKAIMEKRIVNANHDLGRELNVNSGAQIRKYLEDHNVTDWPTTPAGNPSFPEEFLLSNEPGRKIIKVRKAKRMLDAFIQPIIDRHLYKGRIHSTFNQLRGDEYGTVTGRLSSSNPNLQQVPKRDVGNGVLFRSIFVPDEGMVWGSADYSQCEPRLLAHYSKCKVLIDGYTQTPSIDAHTAVAQAANIDRQSGKRLNQALLTGAGNKKAAMMLGKPMDEAMKIVNDYFKAMPEIKALQRVAADAMKERGFVRSILGRRSRLEGDGFEYKAVNRLLQCSNADMIKLSMVKLDELHREVGGINMINNVHDSIDFQYREDRHDAYEQSLRIMCDFPQIKVPIEVDDDSGPDWAWASYGEKDWRKVMTEEGMMASGIDES

SEQ ID NO: 34 - protein, 613 aa, Unknown
  IMGVR_UViG_3300009168_000027
MLANKLPIAQLALRKVLDADTVAVDVETSGLDAFHQHIVGWVLTIGPAPDDSFYIPVRHAGGGNLPSGSQVPSMATNWDGSIHPIEIEIIKALYGKELVFHNAAFDMRFMHRLGWSPSGPIRDTMIGAYLTDELRPSLSLEAVCREEKVQEKRGTDLYKAISARVGCAPDRNSMGFLWQMPGDDDQVVDYSCGDGTSTWQLWESLKVSISKPYYVSANREYSLEAVARVEFDLIPVLHKMSMRGVKIDEERLGSLTKEILEEFDQSLAMIGEMNVRSPLQVKDYFIKHGITNWPKTEKGAASFPESWLKTTKEGQAIVRVRKNRTLLDSFLIPMSGRFMHNGRVHTEFHQTRDEEFGTRTGRLSTTSPNMGAMPGKRQGELGRRFREIFIPDDGMEFTEADYNVCEIRICAHYCQAKAWLDGFKAGKDPHTAISDALGIPRRHAKTINLALMTGAGKTKIASELGIPLQEGLAVVEQYFDGLPELKEFQRQATRAFESRGFISTLLGRRLQLAKPDKAYTAVNRLTQGGNADIIKSAMVALDKVPNIETMLTVYDSTLFQHAKGDTKARNDALDTIVNMKELGIDFSVPMRAEYGSGASWGEATFNEEGWLEK

SEQ ID NO: 35 - protein, 623 aa, Unknown
  IMGVR_UViG_3300006805_000231
MGFHPLPSGRGLFIENNMFPEIPKNEIISLDYETTGLKYWDPDFRVFGVAVAVGHDAWYWDIRDTPNVVQWVRETIQGRTVVAQNAQYEYQCSRVLGADPRLTNWYCTMVAECLINEHHLTYDLASIAKYRNIDSQKTQILEEIRAAMGWRDSREVLSRLSEVPAAMVARYGASDASDALSIYRAQQAEITKQDLHRVLRLEQEVMPVLADMSWTGVRVNLEAAHAAIPRLDEQEGILQAEINEIAGGKFNVNSSPQVRAFFKPEPINKFQWRLLDGTLVGPTKGGKGPSLDQNVMRTIKHPLAEKILALRKTIKLRDTFIRGHVIGSADGDGYVHTQFNQTRNDADAGTVTGRLSSTDPALQQITKRDKVNAAILRAMFLPDDGDEWLCADYSQVDFRCAAHLINDQSVIDAYALDPSLDYHQIVSDMTGIPRNATYAGAPNTKQINLGLAFGAGAGKLAFMMGMSYDIKESRGKMQYVPGQSATDVFNLYHKKLPGVKEFMKKAEAVAKESGYVRTAIGRRLRFPTGAHKAAGLLYQAYAADLHKIGLVEVDALIRTEQLPARLLMSCHDEIGVSMKQDDDIKNLIVKHYTNFNSESSVVRMRVPITASGDFGHNWYEASK

SEQ ID NO: 36 - protein, 641 aa, Unknown
  IMGVR_UViG_3300001201_000003
MIEVKDDDGTVYYGAETMEDCERILREVRDADKIVYDAETSGLDWRHCHTVGHVLTPVGSNSYYVPVRHAGGGNVPGCRVPETEHGWDGSLHPFEKELARVARERPRRWIGHNFAFDLRFLMRVAVILEGVYEDTMINAPLIDENSRFFSLDAVAKYNEVRLKDAGIYEYLAQQFGGEAVKSQMSNWWRTDASAPQVIKYAAGDGYTTSDVWQVQQGDLDKDDLRRVHDVECRLIRTLHRTTSRGIRLDLDELERVQNTFQGEADRLQADLPDWFTNIRAPTQLKRYFAAELDDWPRNPPTSAAINKAREIRDSDPEKADELLKGAPKFDEKALELSSKGRALIEVKKMLHAVSSFTTPMSERHAYQGRVHCEFNQMKGDDYGTVSGRLSSSNPNMQQIPKRNKVISKPYRRVFLPEEGHIWFDHDYSQQEYVVFTNYTKDPNLVEGYMADPPVDIHSMVAKMMGVERDPTAKRMNLGILYGMGKAALAGHLGVSEQQAAAWQREYHTQFPYARPFLKQAEARAKSRGFVKTLLGRRRRFPDRRFAHKAGNAVIQGSSADVTKLKMVEIDEYFESEGDIFGLMLQCHDSLSWTGPESHRYQNEEAIRIMRNFDEGEAIHLQVPIAVDSGEGANWSEATFGA

SEQ ID NO: 37 - protein, 617 aa, Unknown
  IMGVR_UViG_3300027820_000067
VYPDLRKYPYFAYDTETTGLRYPVHKAFACSIAAPDGNSWYYDFRRQPKAVNWLNDTFRTLDANSRVICHNAPFDACMSAGAGIHIPLALLDDTVIRACLINEHEASVFPWNKKRKPGGYSLDYLCRKYLKRGKLDIDVANIADLPYEEAKDYAVEDAILTLLLWEYQKTEIHRMGLYKIEELERRTMPVIIESQMNGIRVDLDQTEQAMAAMTPHINGLKSELNTLAGWDFNVNSPKQMIKLFDPTKTESGWWVGRNRIGTTDKGAPSFKKEYLEELAEFDPRARMVTNIRSALKTRDTFLAKHILEHAIGDRVYPTINQTVRETGGTKWGRLSYVEPAMQQIPSRDKVTAAIVKPCFLPDDGQVWLDYDLASFEVRVFAALVGMYNDYLVRMYQKNPTLDFHQMVADLTGLIRNAEYGGQPNAKQLNLSMIFSQGAGATAQKMGMETEDAKFTDEWGDEIKYQRAGNDAYRIIDLYHSKVRGVRKLAETARKIAEKRGYLRTKFGRHIRFPKRYKSYKASGILIQATSADINKENWCIIDEALDGRGRIVLNTHDSYSMSVDVDHVEDLLGDVKGAVEREFLGVPLLLDFNGVGRNWWAALKNEGIDNVTASAGH

SEQ ID NO: 38 - protein, 625 aa, Unknown
  DTR_680348
MAIFPRLENYDVVAIDTETTGLDWFRGDKPFGVAIALPNGYSEYYDIRKDLAAYQWLRDSVHKIRRPVNHNMKFDIHMLRQVDVMVNTRKAECTQIRAALINEHLMSYSLDALAKKYLKAEKVDDIYEELAKLFGGPATRKAQAPNFHRAPESMMRRYAKVDAELALQLWQWQEEEIARQDLGEVWRLEMRLQPHVIESERVGIRVDEELAKKRISDLTKIVDQTRKEINRLAGFEVNPNPSGSIKKLFEPYKEGDQWYAKDGTPIDTTDAGQPSLGADALKRIKHPAAGLILKCRKMIKTRDTFISGHVLGNIVNGYVHPNINQTKGEVGGDNSGTEGTGTGRLSYTRPALQQIPSRDKEVAALVRPIFLPDEGQLWTYGDLDQHEFRIFAHYANPKSLIEAYAANPDLDMHQIVADMTGMPRSAPASGGANAKQINLAMVFNMGGGELASQMGLPYTWESAVFKDENEERRFKKAGEEALAVMETYYRAVPGVREVARRAGSLAKSRGYVKTMYGRKIRFPGGKFTYKASGLVYQGTAADFNKRNICEIAEYIESECPHNRFLLNIHDEYSMSMMDEGDITVKHLREMKRLVQDKGLRVPIRIDFGGLAPNWWEATKMDVITK

SEQ ID NO: 39 - protein, 622 aa, Unknown
  IMGVR_UViG_3300027963_000788
MAGETYQAYDGTGTRVDPAEVLRRAAKATTWCYDVETSGLDVRRCHVIGYVLGFGPTPKDSFYLPVRHAGGGNIPHPSCPIPDSPTGWDGSLHPIEQDLALLATNPNLHIFGHNLKFDLHMSIRHGIHFEGTCEDTMVNAALINEHQGRFNLDATAKAMRVTAKKGDAVYARMAKEFGGEPVVGQMSNFWRTSAAWAEVADYVTGDGVTTWQVWEAQRIAIDDEELTQVWEVEKRVTKVLWKMEHRGVKIDVPGLEKYKTRLEGMIETSSRKFPADFNARSPKSVADFFRSHGFKDSDFARTPTGKFSFTEPWLQTNDLGRMILNTRKYENLLSSFISPILERHLHGEFIHPSYNQSKQDEFGTVSGRLSSSDPNAQQVPRRNKELGREFRKVWLPDDPEFIWSSNDMSQAEFRLFTHYTGSPVLIRNYNATPPVDIHSWAAEALNIERDPAAKRLNLAVVYGAGVAKIALMLDISATEAKRIRAMYDDQLPEAKTFMKKAETRARNRGYVMTPLGRRARFPDVRLSHKAANRIIQGANADYVKVKLCEIDDYFASEGYEERLLLTVHDSIDWQYRPGREKQNEEALRIFADAGKESRIPLTVPMKVDHKSGRNWSEATYGA

SEQ ID NO: 40 - protein, 595 aa, Unknown
  IMGVR_UViG_3300026095_000032
MSNINPELALRIVRESPLIAFDTETTGLTVKDKVCGWVITDEHHSLYVPVRHEGGGNIPDAEEFEKALYNAFYSRYLSGIRTVGHNLGFDLRIAARHGVVIAGPVEDTMINESVINDLTVGYGLEECAARHQVAAKKGAEIYAAIAAKFGGLADRKQMQHFYKMAGDDPVVVDYATGDGTSTLELRGKQQVLLDRDDLRRVWKLECDLIPYLARMHSRGLRIDADYSERVAVDIKAAIEEAQKKFPLGFNARSPKDVEGLFRANGFKDTDFSKTEQGAVSFREKWLESNDIGQTILAVRRLEKARDSFIKPLVETHNVGGRVFPILNQSKSDDYGVAGARLSCSDPNLQAFPKRNIEIGRVVRRLVVPDEGMLIEEADAKQQEPRLFTHYSEEPALVEGYRNGTMDMHDRASEVLGLDREVAKRLGMGMLTMMSVPTLAGHMRWPIDQAREAHGAFLSDAFPKIREMQQTVMSVFRRRGYIRTMLGRRAYCDEPRFAYRGVSRLIQNNGGDHIKLCILRANQYEDAHPDKVQMLLSIHDSLLWQRRPDHDATELNRIIENVANEMGLIVPIPFGLGSGTDWARASYGSKLDRYEE

SEQ ID NO: 41 - protein, 601 aa, Unknown
  IMGVR_UViG_3300025114_000154
MRTDFNPPDLSSCTELVYDVETDGLDWKRNHAVGHVLTWGPNPDETVYWPIRHAEGENYDPEQVHKYLRKLFANKSLRVIGHHFKFDMHMAKNEGITFHGPVECTQVNQALIDENQGKYSLDFCAKSLGVQAKKGDALYVYLAEKFGGEPNYKQMEHFHKLSADDPMAIEYAEGDGTTTWQLREAQHKYIAEDKLEQVHDIECRVTKTLFRMERVGVPINQYNMDQMTGEIASTLEAYNAELPFEVADARKKKVLKELLIDQGHTDWPMTAPSKTFPDGQPSFKEEWLKTFDLGKKIIRVRKYTNLMNSFITPLKERHIFEGRVYTTFNQMKMDDFGTVTGRLSSSGPNMQQVPKRDKELAPMFRSIFAAPDGTFWSANDYSQQEFRLFANYTGSPVLVAGYNAEPYIDAHTNVAELLDVERDPTAKRMNLGMVYGMGVLALAGHLGITKQQASIYRNKYHKMIPESKSYLKETEYWARQRGYVRSKLGRRRRFPDSRHAYKAGNNIIQMTAADMTKVKMVEIDEYFASKGDDCKIALQVHDELDWFVPFGCEDQDLEAKRIMKSFGPDDEFELKVPTVVDGSRGENWEGASFGTNWLDGK

SEQ ID NO: 42 - protein, 645 aa, Unknown
  IMGVR_UViG_3300025400_000040
MNGSASPVLVTNMEMAGEVFRRLKDDTTRTLVYDCETTGLHWPTNYIVGHVITFGPSPHDTYYIPVRHGAAGTGRDANVIPGHQYDGKKPVGGVAAHPFEIELDQITRTRRDLHWIGHNLQFDLMFNYGHGVEFVGTFEDTQSNACLLDEHQHSFSLESCCKVMGTKEKLGKDLYEHLSRKFGGAPERGQMANYWRLDGDDPIGFDYGAGDGEATWLLRERQLQRLEGQNLLRPWKAESDTLRVIHRMAKRGIRIDLPKLDEVITHCQCIAEQSSKNLPEGFNVRSSPQIKKLMLDNGVTDWPTKPPTPLMIAKAEKLGLKAVGNPEFNEAFLKSNEMGRHVLGVRKYSNICNSFAIPLRERHVHADSRVRATFHPMRADDFGTVTGRLSCSDPNLQQVPKRNKELAQLFRQVFLPDEGMEWWDVDLSQCEPRLLAHYSKAEVLVNGYLADPPVDAHTAVAVAAGIDREDGKRLNQTLLTGGGLTRIREMLGDRADEVYNQYFDKMPEIKNLQKRAASQMTSRGFVISLMGRRARLDDPKFSYKAVNRLLQCGNADIIKDAMVKIDRHLEENGDTVHMLNTVHDALSFQAHPTPESRAIVMEALRLMVDYGPGKTTPLLVPMGAEYGVGANWADATFTKDKHYLQ

SEQ ID NO: 43 - protein, 629 aa, Unknown
  IMGVR_UViG_3300028762_000014
MGYSTPILIRSMDEAQIILRRLEETDSVVYDCETTGLSWKTDRIVGHVFTFGERPDDSYYVPVRHGLDYLSGNIIQHPDKAGHPFELAMAEISRRRRNLHWVGHHFQFDLMFMWSHGIEVSGTMEDTEVNDALLDEFAASHSLDSACKRANTVAKQGSELYKHLAGKFGGPPERRAQIGNFWKLDGHDLIGFDYAAGDGVSTWNLWEKQIEALARPFNAEGDSLEFMRGLESRVTRTVYRMTRRGIKIDVGRLDEILHILETRIIEARKVLPDGFNINSSKEIRGLMEKAGRTDWPMTAPSKTFPQGQPQFNEAYLSSVPEGAPILALRKWENMRNTFALPMKETHLWNGRVHATFTQMANDDYGTVTGRFSSSQPNLQQVPKRDKEKAKLIRSMFIPDDGLDWWDADLSQCEPRLLAHYSESRVLVSGYLSSPPVDAHTAVATAASIDRESGKRLNQTLITGGGKGKIVAMLGERGVEIYNKYFEAMPEVKALQRNAGNRMKARGYVISLLGRLARLEHSDKSYLAINRLLQCGNADIVKYAMVEIDDYFESRGDECAMLNTVHDALGFQADRTNNDHIEQMNEALRLMTDFGPDRGVYLKVPMVADFGIGRNWADATFPQEKMLFGE

SEQ ID NO: 44 - protein, 621 aa, Unknown
  IMGVR_UViG_3300029199_000012
MSEFPNLDGQVICPDTETNGLDWTDPNVNAFGLALSIQGGGDYYWDFRREPNVIPWLEANINKASKIVNHNIKFDMHMLRKRGVNIDPTKAECTQIRAALINEHLPSYALDSLLKRYLKMSKYNEIYQELANLFGGKATRNVQMHNLYRAPVSLVAKYAKDDSRGALKLWEWQEEEIARQGLERIWGLEKRLFKVVYKSEIRGIRVDEDRAEQAIDTITAKVDQDIQQLREIAGFEVNPNPSGSIKKLFAPKQRPDGSWVAIDGTPLQSTDAGQPSLGKEALQSMKHPAAAIILRCRKLMKARDTFIKGHILGHARNGRVHPNINQTKGDNDGGVMGTGTGRLSYTGPALQQIPAQDKDIASMVRPMFLPDPGQRWAYGDLDQHEYRIFAHYVNNPDIIQAYKDNPDLDFHQRVADLTGLPRSAPAAGGPNAKQLNLGMVFCMGSGHMADLCGLPWEWDEFETRDGEKIRFQKSGPEGLELVEEYHRNVPGIREMAAKAKRVAMSRGYIRTLRDRHIRFPHKSMARKACGLAYQGGAADLNKENMILIDEYMESECPHNRLLLNIHDEYSVSLEPDGKEIEHLREIQRLIQDKPDLRVPIRIDFGLPSDNWWEATEADKAT

SEQ ID NO: 45 - protein, 606 aa, Unknown
  IMGVR_UViG_3300005670_000007
MRLDNCPYIGFDTETTGLQYKVDKAFGFSIALPDGTTEYHDIRREPGAIDWFNDEMSRFNGRVVCFNASFDYRMSESSGLYVPLSKLDDVAVRACLINEHEMSYSLDHLSEKYLKEGKEDIYQELAKLFGGRPTRQAQMPNLHLAPVSLVSPYARKDPLLTLRLYEWQEEEIEKQGIRKIVDFERKVMAPLIKAEGMGIRVDAKKAERAMAALTLEITKSQNELNHLVGKEVNVNSTKQIREIFKPTKQNDLYWVTDSGYTLPSTPSGGPSIDSPTLKTMENDRRAVLISSVRSMIKTRDTFLGGHVLGHMVGDRIYPRINQNKGEDGGTGSGRLSYVDPALQQIPARNKVVAAIVKPVFLPEEGCKWASLDQHSFEVRTFAHLVNNPGIIKAYHENERLDLHEYVAKLTGLPRNATYSGQANAKQLNLSMIFNSGNGAIADKMGMGWEWASFDDIRGAKVTYKKAGPEAEKVIEEYHRRLPGVKELAKKAKAIAESYGYVQTHHGRRLRFPRKFKTYKASGLAIQATSADINKEMWLAMDDEYREHGNRLIMNTHDSYEVNVPEGCDAEKMTERIQDSIRARVPWFRVPLVLDLKGVGNNYWGKE

SEQ ID NO: 46 - protein, 627 aa, Unknown
  IMGVR_UViG_3300027606_000002
MDLSQLLKFPQLGSDTETTGLVYPRDRAYSISFAAPTGDTFFVDLRTDRHLIPALQRDFNRYQGTFVFHNAQFDCKMLKSAGLIMPLDKADCTVIRACQINEHEGTVFPWTRGKAGSYSLDDLGWKYLGEKKEDPWQELADMFGGKPTKAAQILNLQRAPRELLRRYQDKDALLALRLWLWQEEEINKQGLHDIIAFERRAFPVLARRAMAGVRVCAATAERAIDKLTMVINEQQAAFEHKIGIPGFNVNSAPQVKKLFDPVQQPNGTWISGRTGAPLATAKSGGPSLDAKVLHAMTDPLAKDIVELRSAIKTRDTFLAGHILGHMVGDRVYPTINQSKGEDGGTSTGRLSYQEPALQQIPNRNKKIAEIVKECFLPEHGQTWLSTDMNSFEVRVFAHLVSLYNPALLEIYKANPKTDFHQYVADLMGVPRNPVRAGQANAKQLNLAMIFNSGKGAIAEEVGMPWEWEEFDTIEYGVEKTVRYKKAGPQAIAMIDEYHRNVPGVKVLADRAKSISESRGYIKTFTGRRLRCIRGYKSYKQSGLLIQSTSADFNKSMWIGTEEPLAELGGSLILNTHDSFDASVDDPMTAYKAMQEVARALPSRVPLLLDLNGFGAHWWDAIRPKDKK

SEQ ID NO: 47 - protein, 610 aa, Unknown
  Station175_SUR_ALL_assembly_NODE_5049_length_19597_cov_3.904769
MEKQAQEVLRRLEMSSDVVADVETSGLDWKHNYIVGHVFNFGPKDEDSFYIPVRHQGGNYMNFPPPSDTATSDTVPLHPFENKINAVLRTKKKQGRKTKFIGHNFNFDLRFMYRTGLVLDGCTFEDTMVNAGLLNEYRSSYSLLNCCLDEGVRPKEGKELYALLAAKFGGPATPSQMGNFWRLNGEDPLAVDYSKGDGISTWQLRSKQLDRLNEQNLMDIYRLECDVVRVLWRMMVRGVKVDKTRLDEVEHIINDRLVEANSALPDDLNLRSGPQIKSLFDKVGITDYPTTDKGNPSFAEKWLLTTDLGRKVVASRKYSNLKNSFIDPLRNMMWNGRIYTTFNQSKSDKFGTRTGRLSSNQPNMQQVPKRNEELGRLFRSVFIPDDDMIWGSADYSQCEPRLLADYAECKVLLDGYLSDPVIDAHQAVATAANIDRTSGKRLNQGLITGMGMATLIGELGVGAEEGKKIYDNYFAAMPEIKPFQIHAAAVMRSRGYVVSLLGRRARIDPRTSKDMSYKAVNRLLQCGNADIIKKAMVDMDRLFEEDGDNVQMLLSIHDSMDSQFPETHRYVYEEGLRLMEDFGPDRSVKMMVPMSVDTGEGKDWAEASYG

SEQ ID NO: 48 - protein, 616 aa, Unknown
  IMGVR_UViG_3300022933_000012
MFDLPDLSQYPVIALDTETTGLLQGVDKAFGVSITLPNLQDFYWDLRVHPQIIDYLNDKLGNYRGIIVGHNIGFDYRMSHAAGLMLPISNLDDTVIRAALIDEHLLSYSLDDLAIRYLNERKETEIYEELASLFGGRATRKVQMPNISRAPVNVVSPYAKKDTNLTMRLWQWQEKEIKAQNLEEIHKFERSLIPTFIKTMERGIRIDSAYAEEAADKLTPLILEDQKTLNDIAGHEINANSSAQIRKLFEPKMEIIRGTKQWVANDGTFLLETNSGNPSIGSDALRQMKHPAAARILSIRSLIKTRDTFIRGHVLGHSVGDRVYPTINQSKGETGGTGTGRLSIQNPAMQQIPSRNKTVAAIVKPCFLPDEGMVWVDGDMSSFEVRVFAHLINNPVINNEYMREPETDLHQFVGDLTNLPRNATYNGQANAKQLNLSMIFNSGNGAIADEMGMPWEWQTFTSTGGKAITYKKAGPEALEVIQRYHSRVPGVKELAQKMQRRAENWGYVMNYKGRKLRFPRGWKSYKASGLLIQSTAADLNKENWKLAEEAMGDDGHLILNTHDSYSMCMPENWQPVWARVKEAIEQPRLRVPLVLDLNGAGENWWKALQGANSGSK

SEQ ID NO: 49 - protein, 617 aa, Unknown
  IMGVR_UViG_3300008463_000003
MYPDLRQYPYFAYDTETTGLRYPIDEAFACSIAVPGDSWYFDFRQQPKAKGWLNDEFDVLQRRGLQTRIICHNAPFDASMSAVAGIRVPLHLLDDTVVRACLINEHEASIFPWNRRKKPGGYSLDFLCRKYIGKGKLEIDIENIADLPYDEAKGYATWDAIITLELWEWQRGEIERQHLEQIEQLERSCMPVIIESQMKGIRVDLDEAERAMVRMTPHIKKLQNDMNKIAGWEFNVNSGPQMIKLFDPTRTNAGWWVGRNRIGTTDKGAPSFRKEYLEELAEFDPRARLVTDIRSALKTRDTFLAKHILEHAIGDRVYPTINQTVRETGGTKWGRLSYVDPAMQQIPSRDKVTASIVKPCFLPDEGQVWLDYDLASFEVRIFAALVGMYNDTLVKLYQEDPNLDFHEYVSGLTGLKRNAEYAGEPNAKQLNLSMIFSQGAGATAQKMGLETTNAEFTDEWGDTIKYQRAGDDAYKIIDQYHAKVRGVRKLAETARKISERRGYLRTKYGRHVRFPKRYKTYKASGILIQATSADINKENWTLINKALNGMGRIVLNTHDSYGMSVSKDSVKRVMKDVTGAVERKFLGVPLILDLNGVGPNWWLALGNKGIEGVITDK

SEQ ID NO: 50 - protein, 598 aa, Unknown
  IMGVR_UViG_3300020048_000384
MVKNQSSKRLLPLAGKGPVIIDTETTGLDKMKDVPYMITYKVGNDIETLEWDASVAKWLAAEGKQADLLVFHNAKFDMHMCINGGVSAAAVRQWKVWCTWIAEVLIDEHLKSYKLRSLSERYFGRGKEDEELIEWIVNNVPQCKKRSDAEAYMELAPRSLVENRNRRDVILTEMLYNRQVKEVLDQDLISITDLEMEVIHAIVNMERTGCPVNASAIERAREEIEFNLLNVMDQMQGIVGYTFNVNSPLQVGKALRESGVDVILSQAGNPVTNKETLRELSGDLPPLILEARHLRKMIENFLDGMLSCVSPDGRIHCDFNQMKSDDYGTKTGRLSASNPNMQQVPKRDERSAEIIRSLFAPKDDYDWINSDWEQFEFRIFAHYCNDPNLLKQYKDNPEIDFHQAVADLTGVARNPYAKQINLGLVFGMGEGRLAQELKLPYKAVKKEDGSSYIEAGSEAKALFRTYHKNFPFAKRFLERASRLAFSRGHVKTLLGRRIRFPYGQSTHKAGGLVFQGSAADLMKRALVQIDKMLYKENCGAQLCLTIHDEFDLISPHDQTKKIKKKIVEIMQDVPELHVPILASCGSGENWWSAMKGEK

SEQ ID NO: 51 - protein, 607 aa, Unknown
  IMGVR_UViG_3300027851_000006
MFQLSKYPVIAIDTETTGLSWPTDRAFGFSLAAPDGTSCYHDVRHEPGRAGDLNFEMSSYAGRIVFHNASFDIKMLDSIGVYVPLHLADDTVIRACLLNEHEQSFSLDYLCEKYLGEGKEDIYPALAKLFGGRATRGVQMKNLHRAPPEVVAPYAMKDAALTLALWQWQEAEIEKQGVQSIMDFERQVMVPLIKAEMRGIRVDTKLAEKAMAKLTLEIDERQRELDKLVNRELNVNSPKQVKEVFSPKKDEYGDWKTDSGFLLESTETGNPSVDAEALRSMEGDRRAELILDVRSTIKTRDTFLAGHVLGHAVDGRVYPSINQNKGEDSGTGTGRLSYTGPAMQQIPSRNKKVAAIVKPVFLPDEGRQWMSLDMNSFEVRVFAHLINNERINAAYAKNELSDFHQMVADLTGLVRNATYSGQPNAKQLNLSLLFNSGNGAIADKMGMPWEWNSFSKEGKVFRYKKAGPEAEAVIAEYHMKIPGVKDLAERAKRAAEAHGYVQTKHGRRLRFPRKFKTYKASGLAIQATAADLNKEMWLLCDRMSSEYGGHLIMNVHDSYELDVRIGADSEAIRNMLQGEIRKVAPWFRIPLVVDLNGIGANYWDAQQ

SEQ ID NO: 52 - protein, 545 aa, Unknown
  IMGVR_UViG_3300009509_000049
MSAVAGVFIPLELLDDTVTRATLINEHEATKFPWNKYKQPGNYSLDYLCRKYLKRGKLKIDIENIADLPYEEAKAYAAEDAILTLLLWEWQQEKIMTPDAWGRTLEAVESLERRTMPRIIRSQMTGIRVDLRRTERAMAEMTPHIKELQAKMDQMAGWGFNVNSSPQVKKLFEPKERNKAWYVGDIRIGTTDKGAPSFGKEYLESLAEVDPRARQIIDIRSALKTRDTFLAKHILEHAVGDRVYPTINQTVRETGGTKWGRLSYVDPAMQQIPSRNKVVAAIVKPCFLPDDGQVWLDYDLNSFEVRVFAALASLYDRTQALLKAYSLDPYLDFHQWVADLTGLVRNAEYGGQPNAKQLNLSMIFSQGKGATAAKMGMETTDDEFEDEWGEKIKFQRAGADADIIINRYHDRVRGVRELARAAKQVSEDRGYVRTKYGRHLRFPKKYKSYKASGILIQATSADINKENWCLIDEAMDGRGRMVLNTHDSYSLSVDPAHLAGVEKDIPGAINREFLGIPLLLDRNGVGLNWWSALQDEGIDNVITVK

SEQ ID NO: 53 - protein, 539 aa, Unknown
  IMGVR_UViG_3300027784_000017
VNPFEDDHVIGIAILVPDLEGGSLGNDYYIPIRHKVGKNLPISALKDLYPVLEDPERAMIGYNVKFDAQFTLTEGIKLRNSLVDVMLAAHLANENELGFTLKRLTAKYIGPEAVEADKQLAVLLKERKLGKGEMDQLPPEDVEPYATMDVRITWRMAQFYQGWLEEQGIAHLWPEINEYLQAIMNMENRGVLIDPDKCREFMEQAAEHRKQLYQDMVEQVGHEFNPNSVPQLRKILGQKHTDKKALAKSKHPIAKKLLQYRGWARAINTYYSKFLELADKNNRIHPSLLLHGTISGRLACRKPNLQGLPKGKSQYKVRDLIIAPEGYKIVAFDWSQAELRLLAHYTQEPFLLNAFQNGENIHTQTANELDLPRDLAKRINFSVVYGIGARGLSHDLEIPEKEAAEYLNKYHRLIPGIRKLYKSAERMAKTKGHIPMWTGRLRHYRPQDEFYKAMSNLIQGGVAEMMRVATTRLGKRLEGSRAHMVLQVHDELLFEVPEDEVMYWAKEIKRIMEDFDFRAPITVEGKVGDTWADAEDLEV

SEQ ID NO: 54 - protein, 594 aa, Unknown
  IMGVR_UViG_3300025018_000341
MDVTFPTITAGDAVVLDTETTGLSWQECRTCGFVVTVEDDGKPKTTYYPIRHEKGPNLDPERVISWIKSWSHLPIKLIGHNLKFDLHFLANDGIYFPNAEFEDTQTNGTLIYEHMKGGFSLENQCYFFGTPAKKGEALYEHMAKQFGGNPERAQMANFWRLSADDPIAVDYACGDGDATYYLWKKQQDRLDADDLRRVWHTECQVLPVLFRMERRGVRIDEERLAYVKAWTLKQIEMARVTLPEGMNVLSAPSVKKVMLDSGITDYPVTPKGNPSFTAEWLEAEGGELGANIIKVRKLENLLHTFIEGAIENNLFNGRVHTNFNQLRNDEYGTITGRLSSNGPNMQQVPKRDKWLAPILRTIFVPDEGCLWSTNDYSQQEYRVFAAYAHCPSLIKGYQRGEDIHSVVAQMLNCERDPTAKRLNMAMLNWMGAKTFSTKFGCSVKEANEYLNIYHSRIPETMIFLRKCQSGVRSRGYIKTILGRRARFEDRGKGYQGSSRVIQGTCADLTKIKMVEVDKYLDEVSGGVLGLQLQVHDALDWSIPPEHMDWNQRAIEIMEDFSMFPKLYVPMTVEGNVGESWGHASFPKQDWSKYE

SEQ ID NO: 55 - protein, 585 aa, Unknown
  IMGVR_UViG_3300009091_000005
MLISTREQFLAMMREICDGPSTTVYDTETTGLRPFKGDAIVGASVLIPDLTGGTNGKTFYLPVRHEGGGNLGLAELRELCREISRPGRTLVGFNLKFDTHFTEAEGVTVRAQPMDVMLAAHLCNENEMSFSLKRLAAKYVDPGAADEEKRLLAALKEKGAKDKSGIRKLGPEEAAPYAEKDVELTWRLARHYAGELDRQGLEELWEGVNEYSVAVTAMERRGVLIDPDACRANLEFARKRQEELNARMRREVGHDFNPASVPQLRRILGQHHTDKAALAASEHPIARMLVECRSWGKAASTFYAAFLELMDGGHRIHPNLNQTGTVSGRLSCTSPNLQALPKGKSLYRVRDLVIAPPGYMLQSWDWSQTELRVLAHYTKDPFLVDAFRKGRDIHGETSAMLGIPRDAAKRVNFGIVFGIGAQGLAGELKVPVTESRRILDRYHATIPGIRKLYNAAQRMAERNRRIPMWTGRLRHYREEDETHKAMSNLIQGGVAEMMRLAITRLHEELRGTDAHQVLQVHDEVLFEVPIGAAAETAGRIKGLMEDFGFDVPVVAEGKAGLSWGDGRMAPIGFDGVHAVIPKLPT

SEQ ID NO: 56 - protein, 604 aa, Unknown
  IMGVR_UViG_3300028804_000099
MRLDSCPVIGFDTETTGLRYMVDRVFGFSIAAPDGTKEYHDIRQNPGAIDWFNDEMSRFTGTIVCHNASFDYRMAKSTGLYLPLSQVDDTAVRACLLNEHEHSFSLESLSAKYLKQGKEDIYPELAKLFGGRATRSVQMPNIHRAPPEMVAQYATTDALLALRLYEWQEEEIKHQGIERIVQFERRVMKPLIEAEGRGIRVDADRAIRAMEELTVKIDRSEKELYSLIGRQVNVNSPKQIKELFGAKKTDNGWIADNGASLPSTDSGGPSLDALVLKAMAWDKRAELILLIRSMIKTRDTFLGGHVLGHMVGDRVYPRINQNKSDEGGTGSGRLSYVDPALQQIPARNKEVAAIVKPVFLPERGCRWASLDQHSFEVRVFAHLVNNPSIIGAYHKDERLDFHSFVASLTGLVRNATYSGQPNAKQLNLSAIFNSGNGAIAEQMGMPWEWSSFRAKDGKEITYKKAGEEAMAVIEEYHRRVPGVKELADKAKKIAEQYGYVQTKYGRRIRFPNKYKTYKASGLTIQATSADINKEMWLVAADEASYSGCRMIMNTHDSYEINVPEGEDPKAMRDRLQESLRSRVPWFRVPLVLDLKGVGDNFWAK

SEQ ID NO: 57 - protein, 600 aa, Unknown
  IMGVR_UViG_3300017987_000015
VLESIDHRGITPELITEISGADAVAVDTETTGLDFDDRILGIGISWLKEGEIDSLYLNAGHPPSLFFPRHPLEGIRAIIQAARNPERFFMHNALFDLERLARWDYMQPGEWPSDSQLVDTQTLSRIAVPFNHKESTSLKHLSARLLGGMPADVASMKNNRGQFAMMPAEKVERYGRADAEYTLRLGLVLLEEAAKAYDEPDTLSHLLRRESAFGKLLTRMQLTGILLNSGWVQEQMGILTRKREEAAARLKGEGLQNPASRSEVISLFRDRGAKLPLTEKGNPRIDEDSLVSLDDPLAGVLLEWRGFDKAISTWLEGFLDKVADDGRLHPRFHAAGTISGRLSCRSPNLQAIPMSDRGASFGSMGGLFLAPGGSELWAVDYGQAELRMLTSYAQSAVMAQSFHKGKDVHKETAREMWPGEEIDRIKRQYGKGANYTISYGGGAGALSVSTGLPYEDAKEVIRRHRRAFPGIAHAQRTTERVWVDRGWLKLLSGRRRWLGGNEKDRAYKAFNQLIQGGVAEMMKDAMLAVDRLMAGTSSRLLLQIHDSIEGELSREDLDRGIKEEIAQAMIDAYPAWLSKRTDPPVRMVVDWERWYPPDAN

SEQ ID NO: 58 - protein, 606 aa, Unknown
  IMGVR_UViG_3300024354_000095
MFPRIENPKVLVIDTETTGLHWWNDRVFGVSLCTETEDTWYFDVRTAPQFIDWLSDLIANNPRTVWVGHNLKFDYHFLREAGVQLPDDRIDCTMIRAALISEHEPTYELDFLARKYAGTRKDSEIYEEMATLFGGRATRNAQMPNISRAPEDMVARYAKQDALATMKLYRWQEGEIGKLSKVHQLERRLLPVIIRMEEGGVRVDIDRAEEAVRGLTKRIETAQRDLNTMAGFEVNPNPSGSIAKLFEPKLEIDGEWYLNDGTRADKTEGGKASINAECLRRMKHPAAKMILDLRKMLKTRDTFLSGHILGHHNDGVIHCNYNQTKNDAEAGTGTGRLSVTNPALQQIPSRDKEIKSLVRPIFLPDEGAAWLGMDWSQFEFRVANHYGQVPAILKAYKDNPNLDFHQLVSDMTGIPRNAEYAGGPSSKAINLGLAFNMGAGRLAQEIGLPCTEETMPDGRPFVKPGPEALAIFEKYHTANPGMRNMQQKASAIAKQRGYVQTMMGRHIRFPGGQFTHKASGLIYQGTSADAMKVKLIEIDQYLTEQDAGRLLLTVHDEVGVSLEKDANPEAIAKIYTTFDGESCEMRFRVPITCDWGVGDNWYTAKG

SEQ ID NO: 59 - protein, 612 aa, Unknown
  IMGVR_UViG_3300001289_000001
MSILSHLADFQIVAPDCETTGLHWYKDTAFGIAIAGYDGVDIVSEYFDFREKPRVVEVLKRELPRCKKLVNHNLKFDAHFMLNLDIPVPLDKLECTSVRAALINEHEESFSLDALGKKHVGMGKVDIYDELAAMFGGQATKGVQMKNLHRAPSALAGKYAVADPIIAIKLWLWQEEEIKRQGLEQVWDLERRLMPILIQMERRGVRVDVGRATESADNIDILVDIAQQELNANAGRSVNVNSPKQMREILLPEKGEDGRWRIGNILLESTGTGAPSLDADALRSLDESGHPLAKNTLRIRKLIKGKSFLKNHILGHEIGGYVYPNYNQTRGDNEMGTGTGRFSIDDPALQQIPARDVEVAEIARSCFIPEDGAEWLCLDYSQFEFRWFAHYAKNPKIMQMYKDNPNSDFHKMAADLTGLPRSARFAGDANAKQINLGLVFGMGKGKMAMEMGLDYEVKTGRGREYLVAGEKAAAIFDKYHENMPGVQALLDRAGSIAKSRGFVKTAGNRHIRFPGGQYTHKAGGLVFQGTSADCMKWKMVEMYEPLKKEGIDILLSVHDELDFNVPIEVKGLLPEIQAMYTRFDGTGVCPIKCDVPITCEAAFGPNWFEASK

SEQ ID NO: 60 - protein, 720 aa, Unknown
  IMGVR_UViG_3300017560_000002
MPAQARNSKSLAAKSVPASQSSTTTKAKKSKSATDVPENKPTAQAKSSGSSTKKKGGDPASDRLQEVLNRLKVSNNIAVDTEGSGLDWRRNHIVGYVLTFGPKPQDSYYVPFRHLGNANVGGHNGPTHAEGWDGKLAPGEKELVEAFDKQGATLTFHHANFDLKFLSRVGYRFRPRAEDTMINACLINEWQGRFSLEFCANVAGVQAKKSAEMVEYLCQKFPEAAAARKSAMGHYWRLPGDDPMAVDYAVGDGTTTWQLREWQMEQLRLQELERVWDVESRLINVLARMSVKGIKVDEGEFSRLRAYIKSEIERLLNSFPSDFNARSPDDVRHWMEKHGCTNWPMTPASKRFPQGQPSMQESWLETHDAGRAVVSLRKFMTLRDTFVQPLMTTHLWNGRVHTNFNQLRNDEFGTITGRLSSDSPNLQAVPKHNEEIGRLFRSIFVPDEGKIWASTDYSQMEPRLLAYYSRCKVLFNGYTSSPPIDAHTAVAVAANREWHNLNENEQKHYRNAYAKRINQTIITGGGKGVLVSKYKVDPAEVDRVWADYFRAMPEIKDIQKRMSKRMRQRGYLITLLGRRCRLLDPNKDYVALNRALQGGNADCMKLKLVEMSEYLDEADSAVDMLNTVHDAVDFQFPEEDRPIYRRCIDIMQSFGPDDVITLDIPIVVDEGEGPNWAIATYGPEKPKKEAPKPAATNAPAKRANGTGTRKKSKGEARAEA

SEQ ID NO: 61 - protein, 602 aa, Unknown
  IMGVR_UViG_3300025038_000016
VFPQINKYNKIAIDTETTGLHFKKDKIFGISMSTPDGEDYYWDIRKEPKVIEWLAEELPKYEGKIIFFNWSFDVKFLLSHEIIVPIGRTDCVMVRAALIDEHLHDYSLDGLAKKYLGERKVSDIYEELAEIYGGRATRKVQMKNLHDAPADLVAPYAKKDTRLTLNLWDWQEREIRKQDLHMVCGLERDLFPVLLDMESTGIRVDIERAERAQGDLTKGIKEDQYKLDDIAGFPVNPNPSNSIKKLFVPKKDVRTEQWVAIDGTKLNSTPAGNPSINADALRAMKHPAAELILNIRKMTKARDTFLGGHILDNALNGIVYPNIKQTKGDDGHGTGTGRLAMAQPALQQIPSRDVKTASIVRPIFLPDEGQEWAYYDLDQHEFRVMAHYVNNPKIVEAYDIDPNTDFHQIVADLTGMPRSPRYAGDANAKQINLGLCFGMGQGKLAQEMGLPYSTDHFSDGREFLKPGPEAKKVFNDYHKAIPGVKSMLKKASDVAKSRGYVKTLMGRHIRFPGGNFVHKAGGLIFQGTSADLNKLNMIRIHNALKDTGSRLLLNVHDEYNVSTDGGEVLNDIQKVIQDHPEIRIPIRTDYGVGSNWWKASKG

SEQ ID NO: 62 - protein, 679 aa, Unknown
  IMGVR_UViG_3300025653_000481
MRPSTLLRLYTEGYAPLGPVALDTETSGLHVDDGARVAVVSIAFQIDEAWEHILESHGSPTETPNDPVWGVEPYCGSLKVSLVSFAFPFDQGVAGTGKVEDTGQQSFFDQDDNLDRGEWEALLEWLQLVGPNGFVFHNAKFDMHMMRAGVRRWPGLGIDLARWLYWDTQNVCHLAWPETKTTSLKPTAKRLWGIKETDESELVQTYLRKAKLPRGRWDLVPWDVIAPYAQQDARLTLRLYLHQLHLLEQGELAPWLDTEHLTPYEAIQRRLEVTLMLYRIEQRGLPFDGQRAETVGKAIDLKVTELQAQLPFKPATLPVAKHYWFGTGDRNGVKGLGLKPYAFTQSGLPQVNAQVIDKMVANKVKGAQEWRDLQKLQTVGSRWYHGWAELVGTDGRLRASFRQNGTVSGRFSVERVQLQAIPHDYRLTNEVLKGIPTPRQLIADGVPDGYELWELDLAQAELRVAALYADCTRMLELIRNGDDLHGDAAKELFSVAPDDPKWGEMRNVAKRANFSLIFGVGPDKLRGDIEAQTGIVLGRDETRDLVYAWHNLYPEYHRSIESHMRIVEKRQKQHGFGWVSLWNGERRWFTHEEEAHKAFNQRVQPALAQFGMDWALATEQRLMNQDGQGIVMTIHDSLVLLLRADKAEDTAKEIQMLGTQLWERVFPGVPGGIDCKRWS

SEQ ID NO: 63 - protein, 647 aa, Unknown
  IMGVR_UViG_3300021387_000840
MLIDTLDKLEAIKPRLLACTDPCVDTETTGLSIFGNAERPRDQVIGVAIEAGGEAYSLPLRHSSGRNLPLTVLPFLRAYLSDPDRTYLGYNYGYDLHMMERDLQVPMAPKFEDAMLALHLINENEPTFKLKEVCDRYGIGDGSLQESVLEDKVFERCRELGVPCSRSARAADNVKSQMHVLDPADVEPYACDDVRLTRQLMDLLRPALEAQGLDRIFGQVNYYDRITVGMEHVGMHVDRDLVERYRAEAEGHAAEAQARLNEAAGFELNPNSPKRVCEWLGTSSSSAQVLQDLIDAGGEGAERARLIQVARGWRSVDSRYYTPYLQEMDSEGVLHCSLNLIGTYTGRLACSHPNLQAVAKATEVFKVKDVFTARPGFTMIQADYKQAEMRLVTHYTKDPTMRDLILSDADLHSATAELLGIPRQAAKRINFSVIYGIGYKKLSENLKVEPEVGRDYLERYHALYPGFRRLMAQCEEFAKEYGYIEMWTGRMRHFNVPTADPHKAMSNLIQGGVAEVVRVAISRLYPAVRELGGRMLMQVHDSVIFEVPDESINVMLPTIELIMTDFEFDPPMGVDIELGKSWGTFKKWDGTQEHVRAYLSEALGGPSEALGTVGTAERPTAPLEGDGGAPVASGTQLTLFDLEGVDA

SEQ ID NO: 64 - protein, 621 aa, Unknown
  IMGVR_UViG_3300031886_000262
MQSLRKRNPTVKDLPNLDHYKDIVIDVETDGLDWRKTKVVGYVITVGPNKNQTWYFPTRHAQGGNCDHKKITNWIKDKIASREDVRLIGHHFKFDLHYLANEGIEFRSKSLECTMVNAAILNENAGKYDLESCAERMGVTPKKGEVMYKHLATLFGGEPDKKQMANFWRTAGNDPVVNEYASGDGISTWQLWQEQQKAIGEQDLWRIHLLECKVLRTLFRMERIGIRIDVDKMKELKMQLEYEYAQTIKEFTKDFNPRSPIQMRALMEKYGRTNWPITAPSKKFPTGQPSFPEEWLKTHVIGRKVISSRKLSHMLSTFINPVLERHEYNGRIHTTYNQLKMDDYGVVSGRLSSSRPNLTGIPKRDKTYAPMLRDTFLPERGCLWSSNDYQQQEFVVFAHYSKAKALVEGYKAEPPIDAHQVVANKMNVERNPTGKRLNLAQVYGQGITALSNHLGITEAEGKKLSQEYHTLFPEARQLYSKAQTTARNRGYVKTIAGRRRRFTNTNHCWTAMNQLIQGSSADITKQKMVEVDEFFESEGDQARLQLQIHDDLNWSYPNNKKGKELNDHAIEIMQSFGEKDAITLDVPLRVDHESGDSWGKATFPEWTRATIFNSEWRRDGK

SEQ ID NO: 65 - protein, 622 aa, Unknown
  IMGVR_UViG_3300006793_000873
MKAEDDYDVWNAEVIGLDTETTGLKYPVDSAFCVSVASLDGRTAAYDFRAEGTKRFKSHLRSSNVKQIVCHNASFDYRMLHSAGVSIPLELFDCTAVRATLINEHESTFFPWTKRRGDYSLDSLCSKYLGEKKTGSELYEALAGIFGGLPTRNVQMPRISSAPWDIVEPYVRRDAWLAVALWDWQRVDIASQGLEAIVAFERDLLPLLINTELEGIRVDIDAADKARAPLAEETAKKQHELDKLAGKPLNVNSAPQIRDMFKPKRIGEDWYVGDYLIGTTPKGQPSLGGDILKNMPDPRAELIGEIRSLIKTKDTFLAKHVIDHSVDGRVYPTINQTKGEDGGTGTGRLSYTEPALQQIPSRNKKVAAIVKPCFLPDEGQVWVDSDMASFEVRVFAHLVAAFDPRIAERYRANPQLDFHQYVGDLTGLVRNATYNGQPNAKQLNLSMIFTQGKGATAAKMGMPWTWEEFTSKEDGNTIRYQKAGREAEAVIAKYHRELPGVTALSNKCKEIVKQHGYIKTEYGRKLRFPNNYKLYKSSGLLIQSTSADFNKRNWGAIDKAIRPHGGRILLNTHDSYSMSLPEDWKSVYSDAREAIESIDTRVPMLLDLNGAGSNWWQALSGE

SEQ ID NO: 66 - protein, 559 aa, Unknown
  IMGVR_UViG_3300013099_000048
MLASTASLAKVAIAQVKKADRLFFDVETTGLHWSRGDRICGVAVDAGHGTHYLPFRHGEGYNLPEHYLGKLAEAMNGKPVCGHNTKFDAHFMALEGYEIPDSLHCTLLASQLLNENVKSLSLKKLGDQYLGSDSSAEDKQLGEELRKRKLKKGDMWKLPSEVVAPYAIQDVDLTRRLYEYVVPRLKGWGLYEIWLECCRYLTITANMEERGMQVDSKVLSKLASRAEIESAALLDKIRTVAGYDVNPGSPPQMKGLLQTADTKASTVERCNHPAASLLLKWRQWSKMYSSYCKPWAEAAALDGAIHASLNLGGTVAGRPSCSGPNLQAVARKTEVYVVKDAIVARPGRVIVSADYSQAELRLGAHYAKEQRMIDVFMADGDIHQETADEAGIKRNDAKRINFGIVYGLGSKGLAEQLRIPRKEAAGMLSKWHATYPGFSKLADAAENAARTDGLIRMWTGRIRRFDGLVSQYRNALSALVQGGVAEIMRTAIMKLDYHRDIAPMLMQVHDQVLFEPKLDDLEEAVYFIREAMQDFHFTVPMKVDISYGPSWGDQKEIVV

SEQ ID NO: 67 - protein, 785 aa, Unknown
  IMGVR_UViG_3300026078_000077
VPKDNTTRVGDVELPDLPPGAWVAYDTETNGLFTDGDPGTDSGDPGSPPARVATASMAYRDPNTGQVVKHAWGFDQGPHPSKDGRVRRPREGGGVEPLDVDKLLANLAKAGYNNGWRDQIGKSGKVLKTRLAIPWTVEQSYEATGLDSWLRLLRWLRARDQLVMHHRKFDEWVTLAGPRDWRIRYEWKNNPALRAEFTPQEATTIDVLMSDPNRDMGPLFGCNLDLVPDENGGLIERPIRGIWDTMLVQAFFDPDHPVALKKSAKRLFGVDADADQKALLAAMSKQGTGLTKRYDLTPWSIMGPYAATDPELTLLLAENQQRRIAEGDHPPKHDEQIDKEFELSRVLLKMERRGVAYDVQTSRRGAQLLTAEMERVHAQLPYDPTKLDEIRKFYFAPEAEGGLGLVPLKLTDQTGVASVDEAQMRLLVQSGKPWAAEYDEWSHCKSALGKWYRGWAERTGPDGRLRTSFKQCVMAEERAGARNGGTISGRLAVGRVQLQAIPHNSQLPTPVRHIPVRSLIGAKEGHALYEMDLPQGEVRIATVVVNCQAMWDVIDSGEDLHGANAKRIFGITEDHPDYKDLRGVAKRIVFGTLYGAGVRTLRAQILEYTGIDYSENETRAAKEAFERTFPEFPRVARRIQRKADRTLGGPGYVTLIDGRRRWFGPDEFSHKAFNAVIQGGLAQTGKTWMIEVERQVPGVQVLAIHDSIVVEVEDNERGVAMATRVAAIGKEVYERDYGIRGRKMYFDIVPERWDEKEPVLPALADQVRAQLGESTAIDRPKELTA

SEQ ID NO: 68 - protein, 624 aa, Unknown
  IMGVR_UViG_3300020443_000001
MDHTEIDVAENAERALRMVREAKEVTYDTETTGLDWRVHSPVGYVVGAPSRELYISPADVVYVPVRHGGGGNLLGGRPMTSATEGFQQHEFEVQLARAFDYRNQQPQLGRTVGHHMKFDVHMSRNAGINMGRKLACSQNMAAMADEYARKYGLEVTADRLGVTAKKAQPMYDHLAATFGGVATHKIMSRFWELSGTDPVAYDYATGDGVSTMEVYWKLDQQLREENMEVVRDLENDLIWTVFRMERRGIKVDMDEIEALRFATEGKISRLMGELPVGFNPRSPLQMRALMEEHGHTDWPLTDKGSPSFTERFLKTNEIGRTVIEIRQMGNLINSFINPLAERHIHKGRVHATLNQLKSDDKGTISGRFSCSDPNLQQVPKRNKELAKPFRRLFVVDGPEWVFWERDYSQCEPRLFAHYAQDENLLKGYNATPFRDAHQVVADLLDVERDPTAKRMNMGIFTGMQPKSFAGHMGWSVEKATVAHRKWFSEFPAIREFQDRAKARLKNKGFVYTLLGRRCRLEHPRFAYRGTSKVIQGGNADIVKYKLLQADRLCEDNGDIVQVNMTVHDSFNGQYQNTPEAKALFDRMVAEMEDVVSEPFNLSVPFLLEGTEGKNWSEATYGVDE

SEQ ID NO: 69 - protein, 588 aa, Unknown
  IMGVR_UViG_3300027907_000007
VKPFPNLSAARAVVLDTETTGVDWRRDRPVGYVVAWGPAPDEVGYWPTAHATGRQEPDKVRAWVRDLVARPDLKIVNHALKFDLHMADRDGIQVAGPLECTLVNMALIDEHRRSYGLDTVAETYEAPAKKTDIYQYLSSKFGLKADTEKDARKTIGMLHQLDAEDPRVHEYACGDGTATWHVWQKQQADLDADNLRTVWGVECRLIRVLYHMERRGVRIDQDQLARVKLAMQRMLEEARRSMPKDFNARSSKQVQAYLESDGVDGWPRTEKGAPSFTEAWLEESEAGKRIIAIRRIENLLASFIGPLENLHIINGRVHPDFNQLRQDDYGTISGRLSCSFPNLQQVPKRNVDLARLYRSIFLPEEGHEWGSADYNQAEFRIFADYTQSAALIEGYRQVPPRDIHMFVSEMISVPRYQAKRINLGLLYGMGKGKLARSTKTTVEQAAEWRRLHDLAIPEGRTFLRAAESAARARGWVRTKLHRRARFPDVRICHKAGSRVIQGTNADIIKLKNVECAEHLAGSESAVTLSIHDELTFSIAPGEHRRFLECVSIMSNFTKGQPIEFQVPMAVDAHTGRNWSEASFPEGKE

SEQ ID NO: 70 - protein, 593 aa, Unknown
  IMGVR_UViG_3300027510_000032
VLVDRVDERYWALVERFEKAPELTIDVETTGLRIWHGDRICGIAIYDGEVAAYFPFRHETGPNLPLERLEDFRQLIRGKTIINHNVKFDVEAMWVDGFPLPHRVEDSMLAAHLMNENEYKLDTQGRPIRKSDGHMATDYTLSNLAKKYLGQADSKDEMERIMKERGLTKNSLWRLPPELVAPYAVGDVKLAKALRDFYVPHLKLWRLYDLWQEVNRYCIITTKMEIRGLQLDQDRICQYMEEAEQMIEPTLKEIQVLAGYGINPASPKQLQAWLELNSTSKAVLEEELMRLPEDHPKAIAIRKIQEYRGWTKVNSTYYQPYLELCDSNGVIHPNLLLHGTVSGRLSCVQPNLQAVPRYSKVYKVKDVFVARPGYVLVSADYSQAEIRWGTHYAREENMVANLLADKDIHSAAAEELEIPRDAAKRINFGIIYGIGREALAKQLRIPTEKAAEYLQKYHERYPGFRRLYKRAEEVATERGYIRMFTGRVRRYDQYNPTHKASSNLIQGAVAEMMRLAILQLDKLLEGWDTHMLLQIHDQIIFEVPEDKLFKVLPTIKEGMENFLPGFELYVPMKVDIKYGPSWGQMTEWTGEEE

SEQ ID NO: 71 - protein, 625 aa, Unknown
  IMGVR_UViG_3300008448_002013
MNFEPINLDKLDEYDVVCCDFETTGLNWRKDKPFGVAIAALGQGAGYSGYFDLRDRPRVLETLRAKMPRVKRFVNHHAKFDAHIAKTAGIELPFNKIECTMVRAALIDEHLSAYNLDYVAKKYIGRGKDDTIYEKLAELFGGKPTREAQIRNLHRAPAKIAATYATPDAEIALLLWQWQEKEIERQELGQIWTMERELTSVLVDVERGGVPVDADLAQAKLKVIVPERQKIIDQLVKKYGKKYGIDDKVFNSPKQKRQLFEVKEQDGRYYVGKVLLETTEAGAPSIDADVLRKLAELGDDRATLIHRAQKLDKAKQFLENHILGHLEGDRVYPNYNQTKSEFGTGTGTGRFSIEDPALQQIPKRDKEMAEIVRPCFVPEKGQDWCCADWEQFEFRWFAHYAQDPGINRTYQENPDSDFHKTTADLTGLPRNPRYAGDANAKQINLGLVFGMGQGKLAAEMGLPFTVENMVVGGESKEVLKAGPEAKEVFERYHSAIPGVQKILRQASSIAKSRGHVRTAMGRHLRFPGGKFTHKAGGLVFQGTSADCCKVKFIELYHNGHKQGRFRLMLSVHDEFDTSIPKGDTKTRAEIKKRLETFDGVATPIKCDIPIRSDVNIGINWYEASK

SEQ ID NO: 72 - protein, 619 aa, Unknown
  IMGVR_UViG_3300018077_000003
MIKELNLSRLPDYPLVSVDVETTGLSWKKDRLFGVAVAAHDPDTKEWASGYWDVRTNSNIVPWLIKLLPQCRRVMGHNLKFDALFARCKGIEFPADRMECTMVRAALINEHEPSFSLDALARKYVGQGKVDIYGDLAKLFGGEPTRKAQMGNLHRAPERLARKYAIEDPQLAIKLWLWQEKQIAEQELERVWAVERALTPVLVDLEWGGVRVDLDRTHRELALTKDRIQRAQSALNAMVGQEFNANSPPQMRKLFNVKKGEDDRWWADNGVLLDDTPGGEGSFSKIKLKLMADRGDKRAQAVIDVRTLVKASSFLKDHILGHEVNGYVHPNYNQTRGDNELGTGTGRFSVNDPALQQIPKRDKEIALITRACFVPDEGQDWCCADWEQFEFRWFAHYVNDPALIAKYRDDPATDFHAMVAAITGLPRDAKYAGNTANAKQINLGLVFGMGEGKLAEEMDLEFSIRHDRSGREWLVAGPEAKAKFEQYHSAIPGIRQLLDQAASIARGRGYVKTMLGRRIRFPSPAHAYKAGGLVFQGTSADCMKQKMIELHATHKKQGFRMLLSVHDEIDFSVPRGKKHVPRAIKYILEDFGPHAAISCRVPILSDVRIADHWAGASLS

SEQ ID NO: 73 - protein, 614 aa, Unknown
  DTR_842505
MLVDTLDKLREVAPDLLACMDPCVDTETTGLDAFGRPGRARDRVIGISVDTSTEAYYFPFRHEQGANLPDGLLDPDGFLGRYLSDEHRTYLGFNYGFDLHMLAAEGIAIPPKFEDAMLALHLINENEPSFKLKEVCDRYRIGDGSLQESILEDRVFEECRRLGLECSRSPRAEHNVKSMMYVLPPADVEPYACDDVRLTRQLMGYLREALRAQGLEEIFRQACYYDYVVVQMEQRGMHVDRPMLEHYRAEAEGNATRAVKALHEAAGFDLNPNSPKRVCEFLGTTSSAAAVLQDLIDAGGEGAERARLVQEARGWLSVNSRYYTPYLEQADEDDVLHCNLNLIGTYTGRLSCSHPNLQAVAKATEVFKVKDVFTARPGMVMIQADYKQAEMRLVTHYTQDPTMRKLIEDGADLHSATAELLGIPRNAAKRLNFSVIYGIGARKLADNLKEPVEQARDYLERYHALYPGFRRLMSQCEEFAKQYGYIEMWTGRIRHFNVPEADPHKAMSNLIQGGVAEIVRVAISRLYPAIHDIGGHLLMQVHDSVIFEVPEGALDVALPTIKLIMEDFEFVPAVGVDIEYGGSWGTFHDWDGGPTWLGEAPVPDCAPEAREGIS

SEQ ID NO: 74 - protein, 595 aa, Unknown
  IMGVR_UViG_3300025585_000551
MSLLDTVSARTARAQHVVIDVETTGLDWRVNQICGYVFSFGPRQDDSFYIPIRHETGPNYDANLVRAMIMSHQDRPRHWIGHNIAFDLGFLTAEGITLNGTFEDTMINAALLDEFRRSFSLENCAEEAGVEAKKSTEIKAHIEAVFHKDFGRNYMGQYWRLSADDKVAIDYATGDGVTTWQLWEEQSKAIAEQDLGRVHKVECDLIPVLNRMTMRGIKIDVDRLYRLKEVTTQARDKAREALGDDTNINSAVQVRKLHEKHGVTDGWPTTEAGNASFPEEYLKTTDLGRKIIAVRKSTRMLEAFIDPMIDRHLYRGRVHASFNQLRGDSHGTVTGRLSSSNPNMQAVPKRDEDAGVPFRSIFLPDDGKVWGSADYSQCEPRLLAHYSGCKVLVAGYTQDPPIDAHTAVAQAANIDRQSGKRLNQALLTGAGNNKAAMMLGLPMDEALKIVDAYFKSMPEIKKLQYEASTIMKRRGYVYSILGRRSRLEEPKYAYRAVNRLLQCSNADMIKLSMVRIDELCRSEGGIDMINNVHDSIDFQYEPGKEHVYRQALEIMCDFPQIRVPIEVDEDSGPDWAWASYGEKTWNKIMADKGML

SEQ ID NO: 75 - protein, 611 aa, Unknown
  IMGVR_UViG_3300021961_000119
MTEFPRIDHAPVVVIDTETTGLKWWADKLFGISIALPGFSGYWDVRSDPHVIKWLNDLIDEKRVDLWVGHNLKFDLHFLREAGVAIPLDRIDCTMTRAALISEHEPTYALDFLARKYCGMKKDDEIYEEMARLFGGRSTRNAQMPNISRAPISMVSKYAIQDAVVTLALYDWQEEQMRTQNLAQVHRLERDLMPVIMDMEEQGVRVDVGLAEKAVRDLTVRVDNMQRDLNSLAGFEVNPNPSGSIADLFKPTLADDNEWYLIDGTKADKTDGGKASINADCLRRMKHPAAKMILDLRKMLKTRDTFLSGHILGHEHDGIIHCNYNQTKNDAEAGTGTGRLSVTNPALQQIPSRDVAIKSLIRPIFKADVGAKWMGLDWSQFEFRVANHYGQVPAILEAYRANPDLDFHQLVSDLTGIPRNAQYAGGPSSKAINLGLAFNMGSGRLAQECGLPYTEEVGPSGNVFLKAGPEAMALFDKYHTANPGMRNTAQKASNIAKERGSVHSVMGRRLRFPGGQFVHKASGLIYQATSADCMKQKLIELHKYLTAEGCGRLLLTVHDEVGVSLDNDSLDKAQEVARIYTTFDGVECPIHLRVPITCDWGIGEDWYEAKG

SEQ ID NO: 76 - protein, 633 aa, Unknown
  IMGVR_UViG_3300032038_001174
MLINTPELLEEVKPLLLACLDPAVDTETTGLSIFGNADRAQDHVIGIAVDIGPEAYYFPFRHGQGTNLPMECMEFFKRYLCNPNRTYGGWNYGYDLHMMAMDGIPMAPNFEDAMLAVHLLNENEPNFRLKDTSDRYHIGDGSLQESILEDKVFEECQRLGLECSRSPRAANNTKSMMYVLPPEDVEPYACDDVRLTRQWLDVCREALTAQGLYDIWKQVNYYSYIITKMEHRGMQVDPGLIHLYQEEAETKSKGALQRLYDAAGFELNPNSSKKVCEFLGVQSSAAERLVELVDAGGEGAERAKLVQEARGWLSVDSRYYTPYLAAMDANNVLHCSLNLIGTISGRLSCSNPNLQAVAKHTDVFKVKDVFTARPGYTMIQADYKQAEMRLVTHYTKDPIMKELIEQNADLHSATAERLNIPRNAAKRINFSVIYGIGYKKLAENLRVEQSIAKDYLEKYHALYPGFRKLMYQCEDYAKAKGEIRMWTGRARHFNVPEADPHKAMSNLIQGGVAEIVRVAISRLYPAIEDLGGAMLLQVHDSVTFEIPDENLNEALPTIKAIMEDFDFDPKPGVDIEYGRSWGTFEKWDGVSVVSVPPPLALPCTEDIGEVQKDSPGTGCKEDATEDMEEGEWR

SEQ ID NO: 77 - protein, 610 aa, Unknown
  IMGVR_UViG_3300000033_000072
VDLPNLSGVKRLALDYETTGLKFWRQDFSVFGVGVSVGDQSWYWDLRQHPGVSQWLRDILPGKMVIAHNAQYEAQCTRTFGIDIRSIQWHCTMVTECLIYEHYLTYDLENTAKRRGIDTDKSGALDRIAEALGVRSHDEALARLADAPEALVSYYGSGDARDAWNVAHCQFPDITAQGLEEVYKLEHDLLPVLADMTWSGVRVDLEAAHAAIPALDIKADILQKEANEIAGAKFNVNSTPQIRAIFNPQPINKFQYRLVDGTIVGQTKGGKGPSIDQVVLRDMHHPLAAKILALRKTIKLRDTFLRGHVIASADENGYVHTNFNQTRNDSDAGTVTGRLSSTDPALQQITKRDKENAAILRAMFLPDPGQEWLCDDYSQVDFRCGAHLINDPNIIRAYQENPALDYHQIVSDMTGIPRNAPYAGAPYAKQMNLGMQFGAGPGKVCFMMKMPYEVTEKRGKIVYLPGPEGKAVFELYHTKLPGVKGFSKHAENIAKETHFVRTAIGRRLRFPRGHGAHKAAGLLYQAYAADLHKFGLVRTDALIRSENLPARLMLSVHDEMGISAPPDESLKNRINNVYCDFNSDTAPIKMRVPITASGKFGKNWWEACKD

SEQ ID NO: 78 - protein, 749 aa, Unknown
  IMGVR_UViG_3300005435_000003
MSGTTVQSDMVVGGVALPDLPPGWPVLFDTEGSGLHPDGDPGTDTNMQKSSPPARVSAASVAWMDPDTGEIHSHAWPFDQGPMVGKPGRIRRPRDGGGYPLLTQEDVDKILSKFRVPGDAVPAPGEDMVGEVPDRPMTYEEACPNLGLEHWINLLRWLRARDYIVMHNAKHDLTVATVGPREEIARDQWLHNPRLRAEFSPQAQQAIDPILWGDDPLGPVFGLDIDKHCPNTKLADTMLIQALLDPLHPVALKRTARRIWGEDSTREEEELAAALKKLGVGLTKRYDLIPWPIIGPYAARDAELALMLLYRQIARIEQGDAPPGAWDQIDKDIDLMRVLYRMQRRGMSYDAKTSMQAAADLQAEMDNIARDLPFDPAKVQEVGRYYFGAKEDGGRGLTPIKVTDKRRDPCVDEAQIRLLVQDGEPYAAEYDDWSHCKSALGKWYRGWAMRTGPDGRLRTDFMQTAIESDRPGAPKGGAISGRLAVSRVQLQAIPHFNQLPDVVKDRPVRGLIGARPGYALWEMDLPQGEVRIATVVTGCSAMWDVIDSGEDLHGANAKRIWGILETDPTFQDLRGVGKRVTFGTMYGAGIDTLRAQILEYTGLEYSRRETAEARDAFYAQFPEFRTVPYRIQCKADKGLGGVGYVTLIDGRRRWFGPDEHTHKAFNAVIQGDLAQTGKTWMIQVERELPGIQVLAIHDSMVVEVPDTDAGYSLAQQAAAIGTEIYERDYSVRGRKMSFPIVPERWKATK

SEQ ID NO: 79 - protein, 597 aa, Unknown
  IMGVR_UViG_3300027533_000132
MEPIIALDTETTGLGPTDRAFGVSWMLTNAPPRYIDIRQQHPAELLDLINSTRHRIVCHNASFDYRMMLRAGIRLPIERLDDTVIRATLIDEHLMHYSLDGLGQKYLGEGKLEEIYEELARMFGGRATKNVQMPRIASAPPEMVRPYACRDAKLCHNLWQWQEREIERQGIQKIVEFERSLMPTIIRNEVMGIRVDTEAANKAVNGLTGEINLATADIYNKAGKKFNIDSPKQVREVFNPHKGMDGVWRNARGYVFPSTPGGAPSFSAEALRETGDPLAAAILAARSLVKTRDTFLKGHILGREVGGRVYPSIHQTKGDNGGTGTGRFSYTEPAMQQIPSRNKRVAAIVKPIFLPDEGQVWVDADMHSFEVRVFAHLVNNARIVAAYQANPRLDFHQHVAELTGLPRAAEYSGQANAKQLNLSMIFNSGRGAIAEKMGMPWSWDSFSKGGSEIRYKKAGTAACDVIDRYHLAMPGVKDLADRASKIASQYGFVETQFGRRLRFPKGEKLYKASGLTIQATAADINKMNWLLIEEAMGGEGRLVLNTHDSYGMSMPEHWLPVWERVRQAVEGGFSWFRVPIVLDLSGSGPNWWESLKK

SEQ ID NO: 80 - protein, 618 aa, Unknown
  IMGVR_UViG_3300027828_000019
MLGQYDRIGLDTETTGLQYPRDKAFCVGIATPDGRNISFDFRSEGTARFQDLIKHYSGRIICHNASFDYRMLLSAGVQIPIQNLDCTAVRATLINEHESTIFPWTRKVGNYQLDTLCQRYIGHKKVDEIYTQLAEIFGGLPTRNVQITNLQRAPWEVVLPYLDGDATLALKLWEWQEDEIERQDIRKIVDFERRLMPIIIKTEVAGIRVNLDRAEQAKEPLTHLLGQKQAELNKIAGRDFNVNSPKQVRELFNPTHRDETWWVGDYPIGTTAKGAPSFGGDYLKEMPDPRAELIGDIRSLLKTRDTFLQRHIIEHSHGDRVYPNINQTKGEDGGTGTGRLSYTDPALQQIPSRNKAVAAIVKPCFLPDEGHVWADSDLASFEVRIFAHLVAAFDGRIAERYANQPDLDFHQMVADMTGLVRNATYNGQPNAKQLNLSMIFCQGNGATAAKMGMPWEWDQFKSGEIDENGDPVMIRYQKAGREAMDVINRYHRELPGVKKLAEKCKEIVGEHSYIKTEYGRKLRFPKQYKDYKSSGLVIQSTSADINKENWMLVDDALDQGRLLLNTHDSYGLSLPEDTWEREYKNVKEAIERDNFRVPILLDFNGVGANWWEALSGDT

SEQ ID NO: 81 - protein, 611 aa, Unknown
  IMGVR_UViG_3300005825_000043
MTDVATKAEQALNMVRNAKELSYDTEGSGLDWKRNFPIGYVIGTDAADMVYVPTRHGGGGNLPDPNVKVPESATDPYVIHWFEKALSEAFEERRVKKLLTIGHNLKFDCHFSANVGILLGRSLTCTQNNEALLDEYARSYSLDACAQRRGVTAKLAQGMYDHLGSLFNCPPTKSSMEHYWRTSGNDPIAVDYATGDGVTTMELFQAQRKKIEEEELNSIFDIENRLIWTLFRMERRGIRVDVEYLKKLQQKIIERVEQAQQALPEDFNVRSPNNVKAYVTAAGRTDWPTTPKGNPSFDEKWLKTFEEGRHIVTVRKWTNLNNTFVTPLIENHVYNGRVHASLNQLKSDDYGTPARLSCSQPNLQQIPKRDKEIAKLFRSAFLPDEGYEFGEADYSQCEPRLFAHYSKEPALLKGYNSVPFKDMHAVVSEMLSVERDPTAKRINMGILTGMFPKTFAMHMGWDIDTATEKWNEWFEAFPKVREFQNLAKGVISRRGYIKTILGRRGRLEQPRFAYRAVSKIIQGSNADILKYFMLVLDEWLEEGGDIVHLLMTVHDAFEFQNPATPEGRAIAVEMLDRAVKVQKPPFNLAVPFVLDSGWGDNWAEATFGADK

SEQ ID NO: 82 - protein, 603 aa, Unknown
  IMGVR_UViG_3300017990_000040
MSYYALSFEPGDVEEPLTAEDIAAIAASDMVAIDTETTGLDYDSRILGISVAWRVPGAMHSAYLNLSHPLSLFSARIDDDIVADVMRAVFEPDRPVALLNAVFDIEKLSRWGHLELPIEYPYLYDAQILARWLMSFEKFQGVSMEKLVSRRLGGMPPWMSSMKKMRSKLGTLPAEKVSPYARADAEFTLMLVEDLMREGRLLYDDEVLDTMLERESRFLWLLTRIQRHGILLDLEEIHERSVRMTADMQELRAFLKQNGIHNPDSRDSVLKGLPMHIVAGLPQTDNGNYKIDSAALAGKGPVAEAVLRYRSLGKAVGTWLDGFRSKVASDGRLHPRFRAAGTVSGRLSCNEPNLQAVPLADRGAAFGSLMGIFKAAPGFSLLAADYEQAELRTCAAYAKSTAMANAFKNGEDIHSFAASLMWPDSEINYELRQLGKRCNYCTTYGGGYRALAENTGIPESEAKIVINTYRRAFPELVAAQNRAGDVWEQRGYITMWNGRRHYKSPNDGSYKAFNQVMQGDVAELVKDAMLSVDARFADMGVGNIVLQIHDSIEVEVQTDAVEDVKAMMRKEMVAAAPLHIMNRTEPPITMDVGFENWYPEEDE

SEQ ID NO: 83 - protein, 626 aa, Unknown
  DTR_890774
MYSPIPDLMSEPFIAVDTETTGLNYPRDKAFGLSLSTQRDDYYWDLREEPHIVDALNHLFSVYEGDIACHNASFDARMSHAAGIKIPLEKMICTAVNACQINEHESAIFPWTKGRAGDYSLDYLAQKYCGIGKDSSFLAHAAEYFGMGKVNKNKIMARIEELPRHLVEPYAKQDTRATYQLYKRQLEIIDEQGLHDIIAFERRTMPALIRAEMRGVDVCVDTAERAQPKLTKLIDQKQAEINALAGREINVNSTKQVSELFAPVETDEGWFAKDGTPLETTGSGKASFGGGALRSITSPEAALIVEMRSLIKTRDTFLGSHILKHEYKGKVYPNINQCKGEDGGTGTGRLSYTGPALQQIPARNKEVASIVKPCFLPPQGMKWVEPDLASFEVRVFAHLVAAYNDSLVHAYAKNPSMDFHQWVGDMTNLPRNATYSGQANAKQLNLSMIFNQGNGTTAETMGLDWHWASFVDNGGKTVRYKKAGPQAMGVIDNYHRQIQGVKTLATRAKMVAETRGYIKTKMGRRLRFPHKYKSYKASGLLIQATSADYNKRNWLKIEEALGGDGHLILNTHDSYSLATPEDWRPYFKRVKEAIEDVSDIGMRVPLILDLDGAGDNWWAAKNGAEK

SEQ ID NO: 84 - protein, 573 aa, Unknown
  IMGVR_UViG_3300026255_000017
MLINTQEKFNSVIPKLLSCVDPCVDTETNGLNSFGTTSTQGHRIIGISIDDGTEAYYFPFRHQIGVNLPMECLEFFRTYLSDPNRVFGGFNYKFDQLMLYADGIPFAPNIEDAMLALHLVNENEENFKLKDTCDRYGIGKGSLEESILLEKCGHKKDRMGELDPTDVEPYACDDVRLTRMLLDLLKPALVHQNLYYIWKQVNYYSYITTQMERRGLCLDVDLIKTYQAEAKEHQEAALSKLYDMAGYKINPNSSKQVCAFLGVKSSARDILDTIIDAGGEAAEKAQAVIEARGWLSVDTRYYTPYMKMMDINNTLHCSLNLIGTISGRLSCSNPNLQAVARPTNVFKVKDVFIARAGYTLVSADYSQAEMRLACYYAHEDTMAELIRNGEDIHSTTAEALDIPRSAAKRINFGVIYGIGAEALHKQLRIDKKTAQQYLNKYHGMYPQFRVLLGQTERYADQYGVIELWTGRRRHFNVQHAYTHKAMSNLIQGGVAEIMRTAISRLYPAISNLHGYMLLQIHDQIICEIPDDKLDIALPTIKAVMEDFNFDPRMTVDISYGKRWGDMQNWSDEI

SEQ ID NO: 85 - protein, 599 aa, Unknown
  DTR_889502
MEVLNKLSTTDKVVIDVETSGLDWKRNYIVGYVFTFSPNPADSYYIPVRHRANNLYDFYPPEDAETTQTLKLHPFEMDVHSIFKERSIHLIGHNLAFDLKFLHKHQIDISKCTFEDTMINAGLINEYRSSYSLENCCIDAGVQPKKGSELYQYLKGKFGGPDTSKQMSNFWRLSGNDEMGVDYAEGDGTSTYQLWEKQQKDLDQQDLRQVWHLENQVIRVLHRMVTRGVNIDEDRLDKVANQTTQKLEEAKNDLPSDLNIRSGAQMKALFDDAGITDYPTTDKGNPSFAESWLLTNSLGKKIIAARKYGNLINSFINPMYAYMHQGRIHTEFNQSRSDQYGTITGRLSSSRPNMQQVPKRNVELGKLFRSVFIPDEGMIWGSVDYSQCEPRLLAHYSKCKVLLSGYLSNPPIDAHTAVAKAAGIDRDAGKRLNQGLLTGMGKAKLIAELGVSEAQGEKIWDDYFRSMPEIKQLQRAAASKMRGTGFVRSILGRRARLDTRTHDMSYKAVNRLLQCGNADIIKKAMVDIDNYLESEGDQVHMLLSIHDSIDFQFYEDNRPQFEQALKIMQDFGPDRGVSLLVPMDVDVGEGKNWAEASYG

SEQ ID NO: 86 - protein, 625 aa, Unknown
  IMGVR_UViG_3300029892_000056
MINLERLRDYPIVCPDTETTGLHWYRDRMFGLALAAWDGERIVSHYWDVREKPRIIEAVNAELRHCKRVVNHNMKFDSHFLREAGIGVPLDRIECTSVRAALINEHEGEHGYNGFDLGALGKKYIGRDKVDIYTELAALFGGQPTRQAQMKNLHRAPAALAAKYATPDPEIALALWMWQEEEIKRQGLEKVWNLERQLTPILIQIEQQGVRVDEDLAHRKMTEIDSHVSKAQHELNRLAGKDVNVNSSSQMRALFGCKKIIADNGRGYNWATDAGFILEVTKTGQPSVGKDALIAMGARGDERASKILTIRKMLKAKSFLKDHIIGHAVDGRVYPNYNQTRGDNELGTGTGRFSIDDPALQQIPARDKDIASIVRACFIPEDGHEWVCGDWEQFEFRWFAHYTQDPNILRMYAENPNADYHQVVSDLTGLPRSPRYAGDANAKQINLGMVFGMGQGKLAYEMGLPYTTRWDERTQTEWYNAGPEAMEVFDKYHSAIPGVKKLLSQASSIARSRGYVKTIMGRHIRFPGGKFTHKAGGLVFQGTSADCMKQKMIELWPVAKEEGFQMLLSVHDELDFSMPKEHRVRQTELVKKHLETFDGMECPIACRVPIRSSVAAGPNWYEASK

SEQ ID NO: 87 - protein, 612 aa, Unknown
  IMGVR_UViG_3300013094_000378
MANVPNIDQVRYMVIDTETTGLDWWKDRVFGVSIALPDGHAQYWDIRQDPQVLDWLRDLALSNRVGLWVGHNLKFDYHFLREAGVVLPPDRIDCTMVRAALINEHEPTYTLDFLARKYCGQKKDEEMYEELAKLFGGRATRNVQMPNISRAPVHIVSKYATQDAVVTQALFEWQETEILKQALHRVHRLERDLMPVIIDMEYQGVAVDVDRAEDAVHGLTTRVDKLQSELNALAGFEVNPNPSGSIADLFKPERRDDGEWYLIDGTRADKTDGGKASINADCLRRMKHPAAKMILDLRKMLKTRDTFLKGHILGHHHDGIIHCNYNQTKNDSEAGTGTGRLSVTNPALQQIPSRDKDIKSLVRPIFIPDVGASWLGMDWSQFEFRVANHYGNVPSILSAYAQNPDLDFHQLVSDLTGIPRNAQYAGGPSSKAINLGLAFNMGSGRMAQECGLPYTEEEGPNGNVYLKAGPEALEMFEKYHTANPGMRNTAQKASSLAKERGFVHSMMGRHIRFPGGQFVHKASGLIYQATSADCMKQKLIELHDYLKTKECGRLLLTVHDEVGISLDNDCREQAEAIAKIYTTFDGVQCPIKLRVPITCDWGIGTDWYDAKG

SEQ ID NO: 88 - protein, 616 aa, Unknown
  DTR_889255
MLCRTKTHYSRVLRRLSSPETTHIVIDVETSGLDWRQNYVVGYVITFGTGDLDNFYLPIRHRSDNISNYNPPITDAWVDSYEIHDFEVQLARILKERGKSLRIIGHNLHFDLKFMAKHGINPVYNVLECTMINAGLIDEYRKSYSLDQCCIEAGVTAKLGDELYQYMSGVFGGAANRKQMANFWMLGGADKVGIDYALGDGTSTYELWEWQNKEIIRQDLQLVHELECRTMNSLHRMMMRGVKIDEKRLDEVSVIVQSRLDQAMKNLPTDLNTRSGAQMLKLFVDNNINDWPTTEKGNPSFPEWWLQTTEIGRHVVVARKYRNLLNSFIDPMRNHLWKGRVHTEFNQSKSDQYGTVTGRLSSSRPNLQQVPKRNEELGRLFRSIFIPDEGMIWASVDYSQCEPRLLAHYSNCKVLVEGYSQTPAIDAHTAVANAANIDRTSGKRLNQGLITGMGKSKLISELGVSAEEGNRIYDNYFDAMPEIKTIQRHAATVMQSRGYVRSILGRHARLQYFSNGGTNNYKAINRLLQCSNADIIKKSMADIDDFLGDSDDCHMLLNIHDSIDFQYKRLSEDKYNGCLDIMRDFGPNRSVDLRVSMEVDQGSGPNWAIASYGEEK

SEQ ID NO: 89 - protein, 618 aa, Unknown
  IMGVR_UViG_3300029913_000170
MYPNLKLFPVFSLDVETTGLDWERGDHVFSFAISTPDDQDYYFDIREHPQSIDWLRSILPTAQLVVNHNIKFDMHMLLNHGVVMDPERVSCTMIRAALINEHMLKYDLDFVAKTCIKSGKSGDIYPKLAELFGGPATRNAQMKNISRAPASIVGPYAMQDARVALKLWMWQQEEIARQDLHQVVKLEQDLFPHIFDMERRGLRVDVNAANATVEKLSKDILILRAELNKCAGFEVNPNPSGSIKKLFEPRKVDGVWTARDGTPLPETDGGQPSIGADQLRAMNDPAAAMILKCRQFLKARDTFIAKHILERERNGRIHPNINQTKGESDSEGGMEGTGTGRLSYTRPALQQIPSRDRAIASIVRPVFLPDDNQSWCYGDLDQHEFRIYAHYVNAPALIDAYRENPDLDIHQIVADMTGLPRSAKYSGQANAKQINLGMVFNMGGGTLAYKMGLPFTVEKMNFSGEEREVRIPGEETLEVMERYYAAVPGVREIAKSARAVAKSRGYVRTMMGRHIRFPRGQFTHKASGLIYQGTSADLNKSNIIRICEYLKSRGDGRLLLNIHDEYSISADPARIPAIAQDIKALIQDRPEIRVPIRIDFSAPAKNWWEATEAEKVTK

SEQ ID NO: 90 - protein, 625 aa, Unknown
  DTR_892447
MGMLPDINKFEVISLDTESTGLRYPRDKAFGVSVSTPDGKDYYWDLRKWPNYKTVLTSWLLMYKGTIVCHSASFDIKMLVAAGVDITSMISQFDCTAVRACLINEHESTIFPWTRGRGNYSLDYLGQKYLGIRKDQSFYDKARTYFGAELTNKKVMERIAELPESITAPYAMQDTRVCLDLWFWQQQEIETQGIQQIVAFEREVFPTLVRSELRGIDVCTETAERAQPKLTAMIDDKQRRLNEIVGAEFNVNSTPQVRKLFNPTETDTGWQACDGTPLELTKSGGPSFGGDALRHITHPAAPLIVEIRSLIKTRDTFLGSHILKHEFRGKVYPNINQCKGEDGGTGTGRLSYTEPAMQQIPARNKAVAEIVKPCFLPPQGMKWVEPDLASFEVRMFAHLVAMYNDSLQQAYAANPNLDFHQYVADLAGLVRNATYSGEPNAKQLNLSMIFNQGNGATADKMGMPWEWAEFTDKRTGDLIRYKKAGIEAMRVIEQYHRKVQGVKTLAERAKMKAESVGFIRTKNGRRLRFPKGYKSYKASGLLIQATSADENKRNWLLIEQALGNDGHLILNTHDSYSLACPEDWKPAYKRVKEAIEGERGLRVPLILDLDGAGDNWWEAKCGKEK

SEQ ID NO: 91 - protein, 602 aa, Unknown
  IMGVR_UViG_3300009678_000237
MIDPELALRIVREAPIMAFDTETTGLTVTDKVVGWVITDKQNSLYVPVRHEGGGNIPNAEEWERELAKAFVERSVCGLRTVGHHLGFDLRIALRHGVTVGNPMEDTMVNEALINDLTVGYGLDNCAERRGLPAKKGAAMYAELARRFGGLPDHKTMKHFYKMPGDDPIVVDYATGDGVTTLALWESQQPELDEKSLRKVHRLECDLLPYLARMHHRGLRIDMEYGSQVNGILEESIKEKSKVFSAGFNARSPKEVESLYRANGYEDHNFDHTDRGAISFTEKWLETNEIGEAILSVRRLEKARDSFIAPLVDTHNVAGRVHPILNQSKSDDYGVAGARLSCSDPNLQAFPKRNMDVGRVVRRLVVPDTGLLLEEADARQQEPRLFTHYSEDEALLHGYRTGEFDIHDRANLVLGLNDRDRAKRLGMGMLTMMSAKTLANHMRCEIKEAEVLHGKFLHDAFPSIREFQNTAVSKFRKLGYVRSILGRIAHCDSPKFGYRAVSRIIQNSGGDHIKTCMLRANQYEDAYPDRIQMLLSIHDSMIWQRDPGHPNTELVKALEHVADEFDLLVPIPFDVGSGLDWARASYGKKLDRYEATLDSGVAA

SEQ ID NO: 92 - protein, 569 aa, Unknown
  IMGVR_UViG_3300025697_000053
MPERILAIDIETTGLTYSDKLLVVSVAWRDEGGDVRGEALNVGMRDLFNSPCTTPQLFGWLRDLTKSRDWLAFHNAGFDLPYLLRIGVLNEDLCQGRIFDTMVTARYTDSRESVSLSKLCDRYGIGTDQWRGMKGKRKKLGKLSADVVLEYGTNDAINTLLLAEQIHKEATSLYSKEWLQAEGDFILLIAQMRVSGIAIDLPAIARITEEQNAELDTINNRLMSVQILGATDNKKLRLYLLSQECLLEEKTSTGRDKLDEGVLREIQAYHQGEVASVITDVLRGRHIRKSLSTWLDGLRDQADDNGRVHPLFVPGGTVSGRLTCQYPNAQAIPRTMKLFAPGKRTKALVSLDYAQAELRLASMYAGETAMAKIFTDPNADPHLETARIMYGDEKAKEYRFRGKRANFAVLYGIGARSLAATSGLTIKQAKEVMELHRQRFPRFAQVTKSAESRWVERGYLVVSSGRRLFASPFDIKHRSYKAFNQLIQGSVACVMQTAMLGIHAQIPEARIVSQVHDSIVLEVLSGDIDDVCRRAVAIMETAVPERILKMVSPRIPMNVDIKLDVTEEE

SEQ ID NO: 93 - protein, 575 aa, Unknown
  IMGVR_UViG_3300025159_000009
MLVTEQNVNSMLRLLSKPKRLAVDTETTDLYTWHGARICGIAVGIPPASLRRCFYFPFRHESGDNLSKTRLRQLIGVLSRRDLIMTGWNFNKFDVHMLLAESMREPEYAEDVMLMLHLLNENERFMGGSYELKTAATRYVDPAARETQLAMKMRMADLGFQSHELWKLSPKEVAPYACADVYYTERLRERMIGPLREWRLDTIWHEVNRYALISRRFEERGLLLDVPLMRRYAKEAEKQVGRYERLIRKMAGYNINLNSNKQLQNWLGVFSTAKDALGRMKGKAPKALITYRQWFRVLSAYYRAYKERMDEHHVLHPNIKLHGTISGRLSAEDPNLQAVPRYTEVYKVKDIFIARPHHLLISADYSQMELRLGAHYARDEFLIGAFRTGKNVHAMTAKDFADLGVTYDSAKRINFAVQYGTGASSLAEEIGCTLERAQQFLDRMHKLHPNYRPLYRQIERHARKHGYIRLWTGRVRRFNQPNPEMWFHKALSNLIQGGVAEVMRTAILRLHEALHSSVYMLLQVHDQLLIETPAIRLKETIKTVRSEMTRDFPFSVPFVVDIKTGKRWGTLRERK

SEQ ID NO: 94 - protein, 724 aa, Unknown
  IMGVR_UViG_3300006498_000011
MVTTDTRVERLNPRGFMRMLAAAGLVRPTVALDTETSGLHPDDGARVSTVSVALVLEGRELEFIRRHLCEGQHVWDSGVVTLQAETYADGVDPVWILSAAWPFDQGVDGTGKPEYSGQGELIPATSNQPHSQWRGLLEGLTGPPPGSYDGPPEGCDLVFHHARFDLAMMAAGVRRWPGDGVDLLDRFLWDTQNVCAQLYAPWVLRRGTGGAMVGTTALKPTCEFLFGTQVGDESRTVHDYLRRAKLPAGRWDLMPWDRVGRYADLDARLTLMLYLRQNHDLGLYGRGELRGLPAPSGHVLDHAYRRMEVTRMLVRTERRGLPYDPVAAREAGDRLRSELAVLVRSLPFEPSVNAAKRFWFAPRSEGGMGLPPYATTAQGAPSLTASILDRMVRDHMPHAEQFARYRGWDSAVSRWYEGWTSMAGPDGRLHPTFRQNGTVSGRFSVERIQLQAIPHDYRLALPEGVPTPRGLIELGVPRGWRLVECDLANAEARVAALLANCRPMLQAFAQGRDLHGETAKALFHVSEDHPDWSQWRTLAKRANFSFIFGVGADTFRESLAAEGTEISRAEAQRIVADWNSLYPQYRRAIRFHEERVKQRVAQYGVGWVDLRNGERRWFTRDEDTHKAFNQRVQGNLAQLAQDWWLEATDKVDQLLAPWVIDGVDRDGTYVGGVGGVLMVHDSLDVLVPIGEIGDLCVDEVVRVGGEAWKRWFPEVPGHVDPSAW

SEQ ID NO: 95 - protein, 612 aa, Unknown
  IMGVR_UViG_3300001815_000001
LIDLTRYHAVAIDTETTGLRWPKDEMFGFSVTVPGWSEYYDIRERPDALLWLQDQARKFKGTWILFNATFDIKMLHSKGVYIPINQVEDTSINAALIDEHLPSHSLDFLGRKYLGAEKLSEIYDDLAALFGGLPTKNVQMPNLHRAPPEVVAPYAIQDTELTYALWEWQQKEIGRQGIEQIVDFEHRVLPYVLKQEMAGIRVDIQQAQKAREGLHVIIDREYNILRKEVGGDMNVNSTPQIKAYYDPHQNADGDWVLRNGLICGTTEKGNPSINNDVLQAMREKDVVADQIIKLRSLIRTADTFLGGHILGHEIDGRVYPTINQVARDTGGTKTGRFSYTDPAMQQIPNRNKEVAALVKPCFLPDPGHVWVDADLNSFEVRTFAHLVAAYNQTISDAYRQDPYTDFHRWVAGLMGVPRDPQPNGGPNAKQINLSMIFNSGNGSIAEQLGYPTFPDQFLGDDGKIVKYRKASPEAMKVINDYHRRVQGVKTLAERCKKKALKRGYIKTKYGRRLRFPNHLKSKAYKASGILIQATAADINKENWMIVDDAIGDRGRMLLNTHDSYSMSIEKDAWKGAWKDVKAAIEKRDWMRVPLILDFNGMGTNWWEALQGE

SEQ ID NO: 96 - protein, 589 aa, Unknown
  IMGVR_UViG_3300025421_000046
MLELPNVSGLVVACDTETSGLHVDDGARVSAVSIAYRHEDKLISAAYPFDQGALDKIGVANSLFDVDDNCSEEEYVQLIEWLGRQRLIFHKMYFDLQILNKGHRKWGHGKDLIMQTVWDTKLAQWVIEPLESTGLKETAARLWGEDEKAEQDALKPYLKQNGNRFDLVPWDVVGPYASKDAELTLRLYESQQEILRLKHDLLPHIELEIDCARTLTKMSYRGIGYDVNRSRVEGQRAVAMMKEVDKQIPFPPTPVEARKWFYEVQEAIPHCVTDKTRQPSVSECCVRSLIQQNIPGAKMYATRQKIMHAIGTYYDGFANAAGEDGRLRTDWKQDGTVTMRFSSNRVNLQALPHDFQTEALKGIIPPRGLFRAEPGWELWEFDLAQAEARVAAKYAGCETWIQMFIDGRDLHSETSVKLFGDAEFQNRQVAKRANFSLIYGVGPATFSRSVEKFTGIKLLDAEAKKIVNEWREMYPEFPRINRKAEQVAERRGFVLLADGRQRYFKPYEEKHKAFNAVIQGSIAQFVKRWMVGIDDDERSRVLLQIHDSLVVEIPEDKVDIGTKAIMNYGSDMATEFFGVPMYSESKRWK

SEQ ID NO: 97 - protein, 613 aa, Unknown
  IMGVR_UViG_3300022226_000030
MGYPSLQQYPYFAYDTETTDLVYKVDEVFGFSISTPDGRDFYYDIREKPKAVDWINDQMRRYKGRVICHNCSFDYRMSHYCGIYLPLEQLVDTVILACQIDEHLHSYDLDYLAKRYVNEGKDKTVYEELASLFGGRATRNVQMPRISKAPSDIVAPYAKQDTRATLELFEWQLREIKRQGINDIVKFELSKMPTFVRTEMHGIRVDLDYAEQAQSKLTPIINRNQKALDKIAGKAINVDSSPQIKTMFDPVEVTPGVWETKDGVRVGTTPGGGPSINAEVLRYMDHPAAQLILDLRSLHKMRDTFLGKHVLEHQVNGRVYPNINQSKGEDGGTGTGRLSYTGPALQQIPSRNKELASIIKPCFLPDEGQVWVDTDKASFEVRVFLHHANNPDIIRMYKEHPETDGHQMVADLTGLVRNATYNGQPNAKQLNLSMIFNQGEGATAEKMGMEWYWDSFVPRGKDEKDRIHYKAPSPEAKAIIEQYHRSMPGVRELAREMKDLALRQGYIETDIGRRLRFPNGFKAYKASGLLIQATAADINKENWTIIEETLGDHGRLLLNTHDSYGMSIEPNWKPHFKRVKKAIERDRLRVPLILDWNGTGNNWHEALQGKDLT

SEQ ID NO: 98 - protein, 569 aa, Unknown
  IMGVR_UViG_3300017963_000310
MLVTQADFQAALQDIANSEMLAIDLETTGLQRWGPHRDRICGVAVRTPRTGYYFPFRHKEGDNLPLEQLPALIEATYHAPVWRGHNWSFDIAFMVQAGWDFPVHPVRLEDTMVLIHLLNENEPSLKLKELGAKYIDSNAQAQERELQAALGKRGGLNKGDMWQLPAVLVESYAVQDVDLTWALAELAHQYLAKRYFHDLGLQVNAYNHLIIRLMLYGVQLDVPLIEQYMAECEEQHTVTEARIQALAGYELNPRSAKQVQAWLGVQSSAADVLETMPDHPGAQLMLTYRAWHRALTSYYRRFLEEMDGQHILHPNLNVTGTVSSRLSCNSPNLQALPVRTEVYKVKDVIVARPGYGLIAIDYQQAEVRVGAHYARETGLIRALEQGLDPHSATAEQLGLPRHFAKRINFGMVYGMGAGPLANDLHISYKEAQALLGQHRGAYPGFRDLYHRAQRIAQTRGYIQLYTGRRRHYNDRKRAPAHKAMSNLIQGTVAEIMREDMMRIDQELCDDHTHLLLQVHDDFLIETPLDGIHEVAAAVEEIMLDVPSWISAPMAVDVKIGTRLGEMLDD

SEQ ID NO: 99 - protein, 616 aa, Unknown
  IMGVR_UViG_3300025887_000425
MDFPNLDNVRIIAVDTETTGLGAADRVFGVSVAFEGFSGYWDTRIAPQVFTWLRDASRSAGRVFVAHNASFDYRMLYRSGLSLPLEQMDDTSIRACLIDENLHSYSLDDLASKYLGVRKLGEIYDQLAQRFGGRATRNVQMPNLHRAPPEMVAPYARRDAELAYKLYLWQEDEIRHQGIEDICAFERRTMPTIIRAEMRGIRVDVEAAALAQKALSIQIDQAQKALDEMCGKPVNVNSSPQVKALFNPQKIRSGWMTDRGDPLGSTPSGAASLDAETLRSLDADPRARLILDVRSGIKTRDTFLGGHVIASAYKGRVYPSINQTRGETAGTRTGRLSYSSPAMQQIPSRNKQIAAVVKPVFLPDAGHLWVDSDLSSFEVRIFAHLVNDENICKLFRDNIKTDFHQAVADMTGLPRNASYPGQPNSKQLNLAMIFNSGNGAIAEKMGMPYTHEHFVTEDGEEVHYRKAGPEAQAVIDTYHSSLPGVKSLASRASEVAKSRGFVHTKFGRRIRFPDSRFSYKASGLLIQATSADLNKAFLIGLDLICRDSGGHLILNTHDSYSLSLPSDQIKKVWSKTTEFLRDEFNWLNVPLLLELSGGGNDWWAALNDEAGLLDSI

SEQ ID NO: 100 - protein, 614 aa, Unknown
  IMGVR_UViG_3300021426_000378
MLIDTPDKFNAIKPSLLACMDPTVDTETTGLSIFGNAERERDMIIGYAIHDGREAYYLPFRHEQGNNLPIDCLHFLRKYLSDPNRTYGGWNYNYDLHMMAFDRIPIAPNIEDAMLALHLVNENEPNFRLKDTADRYGIGDGSLQESILEDKVFEECQRIGLECSRSKNAANNTKSMMYVLKPEDVEPYACDDVRLTRELLDLLKPALKQAGLYELWKQVNYYSYIICNMEHAGMHIDPNIISAYQKEAEDKFADAQRRLNEAAGFELNPNSSKKVCEFLGVQSSAAEVLQNVIDAGGKDAENAKLVQEARGWKSVDSRYYTPYLNAMDKNNCLHCSLNMTGTYTGRLSCSNPNLQAVAKSTEVFKVKDVFTARPGYLMIQADYKQAEMRLVTHYTKDPLMKELIENDADLHSETANRLGIPRQAAKRLNFSVIYGIGYRKLAENLREDPEKAKDYLEKYHALYPGFRKLMYQCEDFAKEYGYIEMWTGRMRHFNVPEADPHKAMSNLIQGGVAEIVRVAISRLFPAITDIGGRMLMQVHDSIIFEVPEEQINIALPTIKLIMEDFDFDPKPGVDIEYGYSWGLFQKWGGELVDVSMLPRPEISSPSHEKGPSLA

SEQ ID NO: 101 - protein, 627 aa, Unknown
  IMGVR_UViG_3300029142_000022
MRRVIHKNQGQIILTTTFPSSLPPVVALDTETTGLHFKLHRVFGFSIAWQGFSAYYDIRKQPEALSWLRDSISRNPGTLWVFFNATFDLKMLANEGVHFDLTKVDDVAIRACLIDEHLMSYSLDSLMQRYLGKEKYGDIYQELADMFGGMATRNVQMPNLQHAPAGMVEPYAEIDAEGTFELWHWQEGEIKAQDIREICEFERRTIPHVYEQEIKGVRVDLDVAERAMNELHIKIDQEKSKLNSLIGRPFNPNSAPQIREYFNPQGNEEDGYIICGGYPTKQTPKGNPSIDNDVLQSIVNVDPVAQSIIDIRSLIRTADTFLAKHVIGHSIDGRVYPTINQVAGDDGGTKTGRFSYVDPALGQIPNRNKTVAAIVKPCFLPDEGQKWLDGDLNSFEVRCFAHLVGAFNDALVQAYAEDPFTDFHGWVAELMGVPRNPHAKGGANAKQLNLSMIFNSGNGAIANLLGLPCTPAHFTDESGKRVNYFKAGKEAMAVINSYHRKVRGVKELAQKAEKAAKRRGYVFTMYGRRLRFASLWKHKTYKASGVLIQATAADINKENWSLVSEALGDRGRLLINTHDSYSMSVDEDKVEECWKDVKGQIERPILRVPLILDRNGCGENWWAALQG

SEQ ID NO: 102 - protein, 615 aa, Unknown
  IMGVR_UViG_3300002856_000169
MNVDLGRLHEYQIVSTDTETTGLHWYRDRMFGVAVAVSDGKTVASQYFDIREQPRVIEVLKKQLPRVKRLVNHNMKFDAHFLLNEGIQVPMHALECTSVRAALINEHERSFSLDALGDKYCGIRKVDIWADLAKLFGGAATKAVQIKNLHRAPASLAGKYATQDPIIAIKLWLWQQEEIEDQKLQQVWDLERRLMPVLIDIERHGVRVDEQRAHDGLKQVYKDVAKAQRALNKVAGKEVNANSPPQVKELFKVKKDKNDKWHTDSGFLLETTDAGNASIGKDVLRVMAEQGDTRARDILTIRRMLKASQFLKDHIIGHAVNGRVYPNYNQTRGDNELGTGTGRFSIDDPALQQIPKRDKDVAAITRSCFIPEKGHDWGCADWEQFEFRWFAHYTKDPRILKVFADNPDADFHQIVADITGIPRNAQYAGAANAKQINLGLVFGMGQGTMAYEMGLDYELVQGRDGKEWRQAGEKAIALFEKYHSAIPGVEALLKQASSVARSRGYVTTVMGRHIRFPGGQFLHKAGGLVFQGTSADCMKQKMIEMHPICKKEGWHMLLSVHDELDFSVPKAQRKKANGIIKSTLETFDGVATPIKCRVPIRSSVNFDANWHEASK

SEQ ID NO: 103 - protein, 621 aa, Unknown
  IMGVR_UViG_3300028733_000027
MYTPELFPELSTFDKIAFDTEATGLYYPRDKVFGISVSTPDGSDYYWDVRRQPEVKRWFNKQMKSYKGVIAMHNAHFDCKMGYGMGLEIPLGQVRCTQIQACLINEHEMEYSLDALSKKYLKDNKVDDIYEKLAAIFGGRATRAAQMPNLHKAPPELVSPYAKQDTSLTLRLYDWQVNHITEEKLQEVVDFEFGVFPTLQRMTRRGVRVDLEAANAAILELDVIIAEDQTKINSLVGFELNVNSAPQIKKVFDPHKEGNVWIANNGYQVETAKKTGGPSMPSPVLREMVNDPRAQLIVDIRSNIKTRDTFLKGHVIGHAVGGRVYPSINQCKGEDGGTGTGRLSYQEPALQQIPSRNKRVAKIVKSCFLPEVGHRWGSTDIMSCDVRVFAHLANNEVVIAAYAENPELDFHQFTADLMGIKRNATYSGEVNAKQLNLSMIFNSGNGAIAEKLGLPFKWESFTSRGELVTYKKAGKEAEEAISMYHQKVKGVKDLAERAKKCAEQRGWVRTHSGRRMRFPRGHKSYAASGLIIQGTAADVNKTALTVLEATLARHDSFLLLNVHDSFEFSVPLEKDIAEVCWDVVKSFQDAFPWMRVPMMLELNGTGKTYFEASTAKGQYLY

SEQ ID NO: 104 - protein, 611 aa, Unknown
  Station138_MES_COMBINED_FINAL_NODE_2495_length_28642_cov_58.41088 6
MNYPDLCRYPYFGLDTETTGLNWPVDRMFGFSWATPDGQSDYYDIRKEPYALVWLKDQLIHSDGDIIFHNCSFDSKMFHSKSVQIPLERCHDTVIRAVLIDEHKHSYKLDDLVLEYLGEQKEDIWAELAALFGGLPTQNVQIGNLAKAPVELAARYGAKDPLLTLRLWEWQREEIRQQGIEDIVNYERGLMPTIIRAELRGIRVDTEYAERAMVAMNAPIEEAQTRLNGIAGWDVNVNSTPQMHKIFTPKWNSEGRVWEAIDGTALGTTDGGNASLKADYLREMTHPAAALVQQIRSLIKTRDTFLAQHVIGHAVDGRVYPNINQTKGEVAGTKWGRFSYTEPAMQQIPSRDKKIAEIVKQCFLPEEGHIWVDGDMHSFEVRVFAHLAKSAPVIAEYARNPGLDLHQYVADQTGLPRDAEFPGQPYAKQLNLASIFNQGNGATAQKMGLPWVWDSFKDEKGHTVRYRKAGTEAMQIINDYHERIPGIKDLIKGCKETAEGRGYIFTFLGRRIRFPNPRFSYKASGLLIQATSADLNKENWQYIEEELDDQGHLILNTHDSYGMSLPMNNWQTPFARVKHRIERPERLRVPLILELSGAGENWWKAIEKPEP

SEQ ID NO: 105 - protein, 611 aa, Unknown
  IMGVR_UViG_3300027907_000025
VEFPRLDGHAIALDYESNGLKYWRDDFQVIGVSIATADSEWYWDIRTTPNVGAWLRDVLPRRQIYSHFAQYEYQCTRLFGIDPRSINWFCTMTGDCLLFEKHLTYDLHSVAVRHGIPSRKAQLQEEIRLAIGCRTVEEAMRRLEEAPPELVAMYGASDTRICYDVATKLLPRMQEEDLMQVMELEMQLMPVLADMSWGGVRVNLEACEPAIKKLDEKELILQREVGEITGNVKFNVNSTPQIREFFKPESINKYQWRLIDGTLVLPTKTGKGPSIDQTALRNCKHPLATKILDLRKTIKLRDTFIRGHIIGNADDRGYVHTTFNQTRNDADAGVVTGRLSSTDPALQQITKRDKENAAILRSMFIPDDRCDWGCFDYNQVDFRCAAHLINDPEIIAAYAANPKLDYHQVVSEMTGIPRNAPYAGAPNTKQINLGLAFGAGAGKLSFMMGMEYTMTEWKGKMTYQPGPKAREIFDLYHAKLPGVKNFMRRAEDVAKATGYVRTAIGRRLRLGRGEAHKAAGLLFQAYAADLHKTGLVRSDRLIREEKIPMRMMLSVHDEMDTSIEKGLDQQTIEHVRHIYSDFNSENSPIRMRVPILSSASIADNWYLASKD

SEQ ID NO: 106 - protein, 656 aa, Unknown
  IMGVR_UViG_3300025906_000012
LKLPDIDGLTVAYDTEGSGLHVDDGARISAVSFAFRDPQSGSIRSASVPFDQGCDQEWLPCGQKDLPVTHARRVNKWDPEHRIAPNRDEAVWHHLHRWLLRQHLVMHHAKFDCLQAAAGLRNSPGTGYDLMPRVIADTMLTAGVLWPRDSVALKVLAVTHHFGKELGILEGAEADEQEALGPWKGPTTDPRFDLIPWLVLGPYSKLDAELTLIAHEFETGMVWEPSQRSSVGSDLALARVLYGMERRGVGLDVPGMLREAGKLSGMVRAAGERVPFRGSTGAPTPPAAVRYFFGDPPGGLGLLPFNDKMTAGGKTRGPQPQVDEEVITRLEKQGVPGAAQYAEYAGLKAALEKWYQPWPAMCGPDGRIRTSHKQGTVVSGRLAVERWQAQAMPHDYQIPEGLLPPRYFLITDDGYEAWEADASQAEIRIATYVAKEKRMYRMLKAGYDSHDAATLLMFYPDCQTKAEAIAKRGPEAWEKNRQVAKRCNLGILYGIGAKGLQIQIAKFTGIEYSVPQCAEWITDWKQALPGFGQALYEYSQLAQSQGFVRLSTGRVRKFSEYEPVHKAFNQRIQGEVAEAAKKAMLRFDREYPGMLLLQVHDSIVAQFPSARKDEITGAMQRIMVETFSQMYSPIPFKADCKPFGRWAYAKPEEVAA

SEQ ID NO: 107 - protein, 611 aa, Unknown
  IMGVR_UViG_3300027851_000044
MSGCELFLDTEGTGLNMIGSDRVTGISYAFGDGPIKYKDIKTDSIDEFKDLVNKAEVLVAHGTKFDAHALRTVGIDISDKNLDCTIVREQLIDEHKLNYDLDSLTGMKVDIIGELAKMFGGQATKNVQMPNLHKAPREFVEKYAIGDIEAMRTLYRRQEGNLPPVHELEKKVLNVLIKMEQKGIRVDTDRLSKAKRDVQLLIDRTQRDLDKLAGMEVNVNSSPQMASLLIATELKDGRTVPKRTGAQKIKLNKKGEEIDIGSKYVLIDGTLADCSDKTGAVSLGAEILEEMTHPLAEMILKVRKYRKIHDTFIVSQLMGHQLGGRVYPWFNQTRVVTGRLSCSNPNLQAVPKRDPEMKAILRPLFLPDDGMQLLKCDYDQSDVRGFAHYIASVTNDKNHPVLKAYENDPDTDFHTFVAEMLKLRRNPGPGGGANAKQINLAMIFNMGMGKLAKQMQLPYVEELGRNGKVYLKPGSEAIEVFNHYHSMIPGAEDMSKMASSVAASRGYVTSICGRHLRFPDKRFTYKASGYLYQSFTADLIKKAMVDVYLELGQIPHLSVHDELIFSIDNAEIAFEIQRVMQDTFKGLTDIPIRTKPEVGRSWGEVQLLGEL

SEQ ID NO: 108 - protein, 606 aa, Unknown
  IMGVR_UViG_3300025715_000130
MRFSEAPHIGFDTETTGLRWPTDRAFGFSVATPDGSSVYYDVRHNPGSIDWFNDEMSQFRGVIICHNASFDFKMAESSSLYMPIDQLDDTVIRQCLINEHEHSFSLDYLSDKYLHERKESEIYDDLAQLFGGRATRGVQMKNISKAPPELVAKYAAKDALLALRLWEWQQAEIEKQGIQAIVAFERRVMAPLIKAEMRGIRVDAGLAEKAMAKLTIEIDAQQKELNALVGCDLNVNSPKQVKAVFSPKQDEHGEWRTDSGIYLPMTDSGNASMDAEVLRGMENDRRAELILAVRSTIKTRDTFLGGHVLGHMVGDRVYPNVNQNKGEDGGTGTGRLSYTEPALQQIPSRNKRVASIVKPVFLPDEGFDWLSLDMNSFEVRVFAHLVNNPTINAAYAADEMMDLHQYVAELTHLPRNATYSGQANAKQLNLSMIFNSGNGAIADKMGMPWEWNSFRNGDKTVKYKKAGPAAEAVIEAYHQRVQGVKELANRAKGAAEAYGYVQTKHGRRLRFPRGYKTYKASGLAIQATAADINKEMWLLTEDMGPGQHLIMNTHDSYEINVRRGTDPLRLKNELQERIRAAVPWFRVPLVIDLNGVGNSYWDAQNG

SEQ ID NO: 109 - protein, 591 aa, Unknown
  IMGVR_UViG_2061766007_000571
MLIDTVDKFEAIKPSLLACTDPTVDTETTGLSIFGCAERARDKVIGIAIHDVNEAYYLPFRHLQGNNLPMECLDFLRRYLSDPNRTYGGWNYNYDLHMMAFDGIEIAPNFEDGELALHLVNENEPNYKLKDVADRYHIGDGSLQESILEDKVFEECQRLGLECSRSPRAANNTKSMMYVLRPEDVEPYACDDVRLTRQILDMLRPVLKTYGLYDIWKQVNYYSYIITLMEHDGMKIDPDLIKAYQTEAKEHAAKALARLHEAAGFELNPNSSKKVCEFLHVDSSAAERLVEVIDAGGEGADNAKLVQEARGWLSVDSRYYTPYLNSMDENNTLHCSLNLIGTYTGRLSCSNPNLQAVAKHTDIFKVKDVFVAREGYTMIQADYKQAEMRLVTHYTKDKTMRELIESDADLHSATAEMLGIPRNAAKRINFSVIYGIGYRHLAETLRVPQSVAKDYLERYHGLYTGFRKLMAECEEFANMNGYIEMWTGRIRHFNTPKCDPHNAMSNLIQGGVAEIVRVAISRLFPAIRDLGGRMLLQVHDSVMFEVPDEVLEIALPTIKMIMEDFDFVPRVGVDIEYGKSWGTFEKWRPSS

SEQ ID NO: 110 - protein, 612 aa, Unknown
  IMGVR_UViG_3300031918_000161
MNSWPRFSEAEQIAFDTETDGLNWPTNRAFGFSIALPDGTACYHDVRHEPGATDWFNDEMSRFSGTVICHNASFDYKMSDSSGLYLPLDRMDDTVTRACLINEHEHSFSLDYLCDKHLGERKEDIYPELAKIFGGRATRTVQMPNLHRAPPEVVRPYAIKDAVLTMRLWQWQEEEIARQGIQRICEFERRVFVPIVKAEIRGVRVDLKKAEQAMARLTLVIESDQKELTALIGKEINVNSPKQTRELFAPKEDETGEWFADNGHHLLKTDSGNPSLDAEALRGMENDRRAQLILTIRSTTKTRDTFLGGHVLGHAVGDRVYPNINQNKGEDAGTGSGRLSYTAPALQQIPSRNKKVASIVKPVFLPELGCQWAAYDMNSFEVRVFAHLVNNPVINEAYAANEMMDLHQYVADLTGLTRNATYSGQANAKQLNLSMIFNSGNGAIADKMGMAWDWNSFSDKAGKVVKYKKAGDEAEAVIAKYHERVPGVKELAQRAKATAESFGYVATKHGRRLRFPNKFKTYKASGLAIQATSADINKEMWLLSDRIFDGSGNHLIMNTHDSYEMNVKEGTNVKDLRELLQEGIRAAVPWVRVPLVLDLKGVGSDYWEAQGE

SEQ ID NO: 111 - protein, 583 aa, Unknown
  IMGVR_UViG_3300000558_000348
MRRLPERVNGESVLTIDTETTGLDKMTDQPFCFLIQVDDGEPMAIRWDLPIIRWLDANLPKARVCVFHNAKFDFHMMRNGGVNPESLYQTNVHCTFVAEALIDEHQLSYSLDNLGQKYFGIAKDDSELVDWLVSHGYGKDRKTAMAHIQHAPWPLVEKYGVGDIRLTRKLFQRQNHELAAQNLQQVFDLEMDTLKALVEIEHRGVPVNEIKVRSTADQLEQRQQVVQSNIIKLVGWEVNPRSPLEMTSAFNKLGIPIRMNGNGRPTFAKDVLDSLDHPFINALKESRGIKTMMDTFIGGSIGKNLRNGRIHTDFNQVRGDDYGTGTGRLSSSGPNLQQVPKRDGELAPLIRGLFYGGHDKLWVANDWEQFEFRMFAHYVKDDALLRRYHDDPSTDFHQALSDMTGKPRDKAKRINLGLVFGMGEGKLAKEVGLPYTVDSDGRFIAGPEAKQLFAEYHTKFPKAKQFLEEASQLARSRGYVKTIFGRRLHFPGGEFTHKAGGLVFQGSSADIMKKKLVELNNEYRNTDVEFVLVVHDEFCLIAPEEYADKVARRVKEITEDVPELRVPVLAKANVGENWWEASK

SEQ ID NO: 112 - protein, 633 aa, Vibrio phage phiVC8
MKLDWERTGRRMGFIDLSKYEVWSYDTECTGLQYKVDKVFGFSIATPDGQSGYFDVREQPESLQWLAEQVEPYKGTIVCHNASFDYRMSLHSGIKLPLSQIDDTGIRACCINEHESTIFPWTRGRAGDYSLDYLAKKYVGAQKYAEIYDELAALFGGKATRKTQMPNLYRAPSGLVRKYACPDAELTLELWLEQEELIKKRGLERIVAFERKVMPTLIRTEARGVRVDLDYAEQAIFKMDGVVRENQAKMFALAGREFNPNSPKQVREVFGAKEEGGVWKSRDGTILERTATGNPCLDADALRSMTDPLAAAVLELRSNIKTKDTFLAKHVVEHSVGGRVYPNINQMKGEDGGTGTGRLSYTGPALQQIPSRNKRIAAIIKPAFLPEEGQLWLDSDMASFEVRIFAHLVAAYNPAIAKAYAENPELDLHQWVGDLMGIPRNASYSGQPNAKQMNLGMIFNRGDGAVADSLGMPWEWCEFTDKKGELIRYKKAGREAKSIIAAYHSQIQGVKTLATRAQKIAEERGWIQTAHGRRLRFPNGYKSYKASGILIQATAADENKENWLRIEDALGSDGSMILNTHDSYSMSVDENWKPIWERVKKAVERQTLRVPLLLEFDGVGKNWAEAKGLIDVH

SEQ ID NO: 113 - protein, 624 aa, Acinetobacter phage SH-Ab 15497
MAFPNIEQYPQISVDCESTGLEWYKEDRAFGVSIYLPTGDAEYYDIRKDRNAFHWMKDNLWKAKKIVNHNIKFDIHMLRATGINLNPANCECTMIRAALIDEHLLKYDLDSLLKKYLKMSKDNDIYADLAQIFGGQPTRKVQILNLHRAPVDLVARYANIDTEGAYKLWEWQEGEIERQDLHQVWQLERRLFRHIVEMERRGIRIDPNEANRRAEELDRVTAETVAELNRLAGFEVNPNPSGSIKKLFNPKQNEAGIWVARDGTPLPKTDSGAPSLGAKSLESMTDPCAKLILKARKLNKTKDTFIRGHVLGHAIQNGQDWFVHPNINQTKSDTGDGSEGTGTGRLSYTRPALQQIPSRDKEIASIVRPIFLPDRGQKWSYGDLDQHEFRIFAHYANPKDIIEAYAQNPDLDMHQIVADLTGMPRSATKAGEANAKQINLGMVFNMGAGELASQMGLPFTIESVDFGDHVHDLKKAGPETLEIVENYYAKVQGVKEMARKARTIAKSRGYVRTLMGRHIRFPRGMFTYKASGLIFQGTAGDLNKLNICNIAEYLESECPYNRLLLNIHDEYSVSLEDDGKEIKHLKELQGLVQHRPELRVPIRIDFSHPAPNWWLATRADLATK

SEQ ID NO: 114 - protein, 625 aa, Salmonella phage PMBT28
MAIFPRLENYSEVAIDTETTGLDWFRNDKPFGVAIALPNGYSEYYDIRKDLAAYQWLRDSVHKIRRAVNHNMKFDIHMLRKIDVHVNTRTAECTQIRAALINEHLMSYSLDSLAKKYLKAEKVDDIYEELAKLFGGPATRKAQAPNFHRAPESMMRRYAKVDAELALQLWQWQEEEIARQDLHEVWRLEMRLQPHVIESERVGIRVDEELAHKRIGDLTKIVDQTRKEINRLAGFEVNPNPSGSIKRLFEPYKEGDQWYAKDGTPIGTTDAGQPSLGADALKAIKHPAAGLILKCRKMIKTRDTFISGHVLGNIVDGYVHPNINQTKGETGGDDSGTEGTGTGRLSYTRPALQQIPSRDKEVAALVRPIFLPDEGQQWTYGDLDQHEFRIFAHYANPKSLIDAYTENPDLDMHQIVADMTGMPRSAPASGGANAKQINLAMVFNMGGGELASQMSLPYTWETATFKGESEARRFKKAGEEALAVMEKYYRAIPGVREVARQASSLAKSRGYVKTMYGRKIRFPGGMFTYKASGLVYQGTAADFNKRNICEIAEYIESECPHYRFLLNIHDEYSMSMVDEGDITVRHLKEMKRLVENKGLRVPIRIDFGGLAPNWWEATKMDAVTK

SEQ ID NO: 115 - protein, 697 aa, Arthrobacter phage Wayne
MARVRLLPSDLLGYAKAGLLPGSSMAVDTETSGLRVDEGARISTVSISWLDEDNEWSFVQNEQWPSGISTNRKEPVLEGWPDVRVVSFAWPFDQGVSETGKPEDNGQATLWPDAENLPLTEWLALLDFIEFVGERLSLDMQNMKFDLHQFRAGVRRWPGVGREFEHLVEWDTQNGNDLVFGFLPSTSLKGPGTATEHLWGEQESDEKHVISEYLKKKKLPKGRWDLMPWDVIAKYADQDARLTVRLKHVQQDKILSGGVPWMDGKKGRMDASEAFLRRMNMTRLLYRMEKRGLPFDIEEAELASAELKRRAKEFGKGLPFKPATLDMAKHYWFGSGIKQGVEGLGQPPIATTATGAPSLTANDLGKLILQELPGAAAWRNFAKCQDADSRWYEGWLTKAGGDGRLRTSVRQNGTRSGRFSVEGIQLQAIPQNYKLSGYEGMDGIPSPRALIGSAVAKMPGWEMWELDLANAELRVAALFAKCQRMLDMIDQGMDLHGETAKELFNAAEDDENWDQRRSIAKRANFSLIFGVGWETLQQNIEVNTGIVLSDREAQVLVKDWNALYPEYKRAINAHMARIEQRQKKELGGYLQMSNGERRWFARHEDTHKGFNQRVQPSLAQYGIDWWTISDEFISSQLTEEELEVGGTVLLVHDSMVLLLPSDRAEGIINQVIDLGVGLWSERFPGVPGGVDAKEWNR

SEQ ID NO: 116 - protein, 641 aa, Gordonia phage Ghobes
MTEVRDLSDLPPSQALPEPSSVTDLVDFDTETSGLHCDDGARVSVVSLAWRGHDDVLYAGAWPFGQGGHPKASDGLERVFDLGQAEWNFLLDWLAHAGGGLCGHNVAFDLQLVNGGAKPGYAGRNLTPRFRWDTQVVAKELWPRYKTGLKPLAVRFFAEDADAEQKALGPWLGPKTNPRYDLVPWEVMRPYALADAVYTNRLRHLEADLVEEGYLGTKHVGRQLEVTRALVRMQLAGLPYHVEGSREAAAELEERMRVLAEGFPFKPTPQGAKKYYFTEEGLNLKPYARTEKGAPQLTQEDVEKLVRAERPHAKQLQEYNRYKSAVSKWYRPFADRAGKDGRVRSQLRQVATSYDTDAGTKSGRFSAGRINLQAVPKDFKLHLPVPTPRNLVTRAVRESAPGWDLWDLDLAQAELRVAALYAGCKPLLEVLNDGRDPHGETAAQLFGTPPGHPDYDFNRQVAKRGNFSLIFGSGVDTFRAMVQREAGVDLGRQRTEEVVYGWRDLYPEFGEAIRAQQEFCDEFGYVQLPNGRRRYYEKYEDTHSSFNQLVQASLAEYAKDWLVDTDQLLLPYRRRGVEAGVGLAGLLLVVHDSQLLLLPSDEAEEVVHEVQERAVKLWDNTFPGVPGGVDATRWVLPEEKS

SEQ ID NO: 117 - protein, 625 aa, Alteromonas phage ZP6
MGTLENEILNSDVIALDTETTGTYWPRDKAFMLSLSTRWSDYYWDLRQEPKILGHLQSILLRKPRLVIAAHNASFDYKMCYSAGLATRVESWDCTVVRACLIDEHESSHFPWSVGRGDYSLDYLSRKYLGARKSEEFYERARQWFGKPKMSKKAIMSRIAELPSDVVGQYAMVDTRLCLDLWHWQQEEITRQGLHDIVAFEKKMFPVLLKSEMKGIDVDTDEAERAQPKLTTIIDQKQKELNQIAGGEINVNSTPQIRKLLEPRETDDGWVACDGTPLETTKSGNPSISGDTLRKIQHPAVPYIVEIRSLIKTRDTFLGGHILGHAVDGKVYPNINQAKGEDGGTGTGRLSYTKPAMQQIPSRNKAVAEIVKPCFLPPEGKVWLETDLASFEVRMFAHLVAAYNDSLVEAYKKNPEMDFHQWVADMTNLVRNAEYTGQPNAKQLNLSMIFNQGKGSTAEKMGMPWEWDEFTQKGKVIRYKKAGPEAQRVIANYHRRVQGVQELADRAKMVAEAQGFIRTKMGRRLRFPRGYKSYKASGLLIQATSADVNKRNWLVIDEVLGDAGHLILNTHDSYSMAVPENWKPYFKSVKAAIEDTSDLGLRAPLILDLDGAGRNWWSAKCGELK

SEQ ID NO: 118 - protein, 765 aa, Microbacterium phage Goodman
MSSQQKQITPHQLLELWDTRTGLRPRHPVALDTETSGLWVDAGARVSTVSIAWRVDDDQLREWALVLGGGEQYLWDTGIWTLRKEITAGARSNTWTKGGWTQEHWILSFAWPFDQGTVGTGKNEDPTDRIVEAGLGGMLADLAGVWTPDLPEAHPNLPEREWDDLLTWLKLVGQSVRITMHNAKFDIHLMLAGTRVYFGFIDLMEYVDWDTQGGNDLWIAWRTADFGKPTTSLKPTAQWLWGESEGDEKAVISKYLKKMKLPPGRWDLMPWPIIAKYADQDARLTARLRIWQEAEQARIKGSQGLDGPEKGWDAGWRPEAFERRMETMRMLVRVERRGVPFAPQVAVQAIEDLEARIAEVEAVLAEALGGKVTLPMAKHYWFGSGDVSGEGGKQVRGLGLEPYAVTDTGAPVVDIAVMSKMIRDGVPLVEEWRAYKKLTDAKSRWYEGWGNRVGADNRLRPGFRQNGTASARFSMEEIQLQAIPADYKVKGILAGIPSPRDLIGEGVPEGYGLWEMDLAQAELRVAANFAKCYRMLELIEAGADLHGETAKELFGTSPDDDSWGSDRQVAKRGNFSLIFGVGAATFQATLWKEAEVDMPIDQVKDLIYAWNALYPEYRRAIDYHESTVMARYHKYGVGWIHDQATKERRHFTKWDVEFFDQHRQELRLGAHKAFNQRVQPALAHYGIDRWLAEDRYLEQKYRGTEHARVGAGLVLMVHDSSVLLLPNEDAEQVTADLREMGRKLWAERFPGLPGDLDISAWAGHA

SEQ ID NO: 119 - protein, 766 aa, Microbacterium phage Theresita
MGSKIYPSTLVRLMDSRGLKPGAPVAIDTETSGLWVDAGARVSTVSVGWIVADEDVAEWAGVLGGASDEDQYLWDTGIWTLRKEVTHGARSSEWAHGDWLGREWVLSFAWPFDQGAMGTGKPEDRTDEIIAEGQKGLLEGIWVPDPPQPDSANLPRSEWSQLCSWLRSVGEDVGLTMHNAKFDIHMMRAGVRGYDWAGVDLIDLVTWDTQGGADIWVGWRTADSGRSTTSLKPNSSWLWGEHEGDEKKVISAYLKKHKLPAGRWDLMPWRVIAQYADQDARLTCRYRRWQEVEQKRVYSCRADKTLAEYGWTTGWSKESFERRMETMRMLTRVERRGLPFDGSLARDVGRRLQERIDEVEAKLEAALGTVTLPVAKHYWFGSGDKLVGEKGSKRDVRGLGLADYGKTEKGEPIVDQATLAKMHRDGYPLVEEWMAYKKLTDAKSRWYDGWTDRMGRDGRLRTGFRQNGTASGRFSVEEIQLQAIPADYKVKGGPLAGLETPRDLIGAGVPEGYALWEMDLAQAELRVAADMAGCRRMLDMIEAGEDLHGYTARELFDVTPDSEDWGEKRQVAKRGNFSLIFGVGWETFSATLWKEAGVDWGEQETRQMIAAWNALYPEYKAAIRSHEAVVMRRYDKYGVGWIADRATGERRWFTKWDIEYFNPRTQRLEKGAHKAFNQRVQPALAQYGIDRWLGEERYLTERAKREGWDDGAGLVLMVHDSSVLLLPDEVGEEVTSDLKAMGEKLWAERFPGLPGGLDISRWDDHA

SEQ ID NO: 120 - protein, 796 aa, Streptomyces phage Hiyaa
MIPAQHPELKIPEGWNATQVGNDLLPDLPPGWPVAWDTEGSGLAVDGEPFVTAGRPAHPEARISAVSVSFRWPNPDGTPGEIVDFAWPFDQGPVLGKPGHPQKDPVTGIVTFKPIDEADQAKILAQHSKSLGYTVTPEMAMPNLHPDEYGVLVMWLDFRDNLAAHNSVHDMHQERVGLRADAGGFGGPEGLWAWDPDTEPGSLAKSIMDGSTPKLHMMEPTRVPLSFSKSRRNIWCTMVVQKQVVDPLQPAALKPTARRLWGDDSTDEETALAEELKRQGVGLTKRYDLLPWCGAVGVYAAKDTNLCYRLWEYQENVGEEGLIPKYWELVNTEMELRTTLYRMERRGVAYNAEESFAEGKRVRAINAEKARELPFNPSKRLEAARFYFGPVCLNEINRTRRNVKPQETVWSAFFCAKSCTECEGKNGLGLEPTERTPTGQPKLDIPEKIRLDEAGHPFAAELMAWTKRRDADSKWYTGWAARVGRDGRIRTSFKQCKNDKERAGAAEGGTKSGRLAVGRWQCQAIPHIELVPKDAKPVRPMIGQVPPGTMVTRWDGTKEPTPVRRIQFEHDLSAGEVRVVTVISGSTKFWDALDAGMDMHALNAKSLFGVDESHPQFKYLRSAAKRGTFGIIYLGGVKAIQTQMEAASGMKMKTTDVQKAKDNFWAENPEIKAFSDRAVQRVTRWMGGPGYLKMLDGWRRWYAVDEKTVSAPNQVIQGNLARAMIYWMTAVEREVPGCLLLQVHDSLVTEHDDTPEGHAEAKLVSEIGQRVFQEYFNVRGRVMDFGIAPDRWDEKA

SEQ ID NO: 121 - protein, 633 aa, Vibrio phage VP2
MRLDWERTGRRMGFIDLTKYEAWAYDTECTGLKYKVDKVFGFSVATPDGQSGYFDIREQPDAVQWLVEQADSYKGTIVCHNASFDYRMSLHSGIKLPLSQIDDTGIRACCINEHESTIFPWTRGKAGDYSLDYLAKKYVGAQKYAEIYDELAAMFGGKATRKTQMPNLYRAPSGLVRKYACPDAELTLELWLEQQELIAKRGLEKIVAFERKVMPTLIRAEARGVRVDLNYAEQAILKMDGVVRENQAKMFQLAGREFNPNSPKQVREVFGAKEERGVWTSRDGTILERTATGNPCLDADALRAMKDPLAAAVLELRSNIKTKDTFLAKHVVEHSVGGRVYPNINQMKGEDGGTGTGRLSYTGPALQQIPSRNKRIAAIIKPAFLPEEGQLWLDSDMASFEVRIFAHLVAAYNPAIARAYAENPELDLHQWVGDLMGIPRNASYSGQANAKQMNLGMIFNRGDGAVADSLGMPWEWCEFTDKKGDLIRYKKAGPEAKAVIAAYHTQIQGVKTLATRAQKIAEERGWIQTAHGRRLRFPNGYKSYKASGILIQATAADENKENWLRIEDALGSDGSMILNTHDSYSMSVDENWKPIWERVKKAVERQTLRVPLLLEFDGVGKNWAEAKGLIDVH

SEQ ID NO: 122 - protein, 633 aa, Vibrio phage VP5
MRLDWERTGRRMGFIDLTKYEAWAYDTECTGLKYKVDKVFGFSVATPDGQSGYFDIREQPDAVQWLVEQADSYKGTIVCHNASFDYRMSLHSGIKLPLSQIDDTGIRACCINEHESTIFPWTRGKAGDYSLDYLAKKYVGAQKYAEIYDELAAMFGGKATRKTQMPNLYRAPSGLVRKYACPDAELTLELWLEQQELIAKRGLEKIVAFERKVMPTLIRAEARGVRVDLNYAEQAILKMDGVVRENQAKMFQLAGREFNPNSPKQVREVFGAKEERGVWTSRDGTVLERTATGNPCLDADALRAMKDPLAAAVLELRSNIKTKDTFLAKHVVEHSVGGRVYPNINQMKGEDGGTGTGRLSYTGPALQQIPSRNKRIAAIIKPAFLPEEGQLWLDSDMASFEVRIFAHLVAAYNPAIARAYAENPELDLHQWVGDLMGIPRNASYSGQANAKQMNLGMIFNRGDGAVADSLGMPWEWCEFTDKKGDLIRYKKAGPEAKAVIAAYHTQIQGVKTLATRAQKIAEERGWIQTAHGRRLRFPNGYKSYKASGILIQATAADENKENWLRIEDALGSDGSMILNTHDSYSMSVDENWKPIWERVKKAVERQTLRVPLLLEFDGVGKNWAEAKGLIDVH

SEQ ID NO: 123 - protein, 633 aa, Vibrio phage QH
MRLDWERTGRRMGFIDLTKYEAWAYDTECTGLKYKVDKVFGFSIATPDGQSGYFDVREQPDAVQWLVEQAESYKGTIVCHNASFDYRMSLHSGIKLPLSQIDDTGIRACCINEHESTIFPWTRGKAGDYSLDYLAKKYVGAQKYAEIYDELAAMFGGKATRKTQMPNLYRAPSGLVRKYACPDAELTLELWLEQQELIAKRGLEKIVAFERKVMPTLIRAEARGVRVDLDYAEQAIFKMDGVVRENQAKMFQLAGREFNPNSPKQVREVFGAKEERGVWTSRDGTILERTATGNPCLDADALRAMKDPLAAAVLELRSNIKTKDTFLAKHVVEHSVGGRVYPNINQMKGEDGGTGTGRLSYTGPALQQIPSRNKRIAAIIKPAFLPEEGQLWLDSDMASFEVRIFAHLVAAYNPAIARAYAENPELDLHQWVGDLMGIPRNASYSGQANAKQMNLGMIFNRGDGAVADSLGMPWEWCEFTDKKGDLIRYKKAGPEAKAVIAAYHTQIQGVKTLATRAQKIAEERGWIQTAHGRRLRFPNGYKSYKASGILIQATAADENKENWLRIEDALGSDGSMILNTHDSYSMSVDENWKPIWERVKKAVERQTLRVPLLLEFDGVGKNWAEAKGLIDVH

SEQ ID NO: 124 - protein, 633 aa, Vibrio phage J2
MRLDWERTGRRMGFIDLTKYEAWAYDTECTGLKYKVDKVFGFSVATPDGQSGYFDIREQPDAVQWLIEQADSYKGTIVCHNASFDYRMSLHSGIKLPLSQIDDTGIRACCINEHESTIFPWTRGKAGDYSLDYLAKKYVGAQKYAEIYDELAAMFGGKATRKTQMPNLYRAPSGLVRKYACPDAELTLELWLEQQELIAKRGLEKIVAFERKVMPTLIRAEARGVRVDLNYAEQAILKMDGVVRENQAKMFQLAGREFNPNSPKQVREVFGAKEERGVWTSRDGTVLERTATGNPCLDADALRAMKDPLAAAVLELRSNIKTKDTFLAKHVVEHSVGGRVYPNINQMKGEDGGTGTGRLSYTGPALQQIPSRNKRIAAIIKPAFLPEEGQLWLDSDMASFEVRIFAHLVAAYNPAIARAYAENPELDLHQWVGDLMGIPRNASYSGQANAKQMNLGMIFNRGDGAVADSLGMPWEWCEFTDKKGDLIRYKKAGPEAKAVIAAYHTQIQGVKTLATRAQKIAEERGWIQTAHGRRLRFPNGYKSYKASGILIQATAADENKENWLRIEDALGSDGSMILNTHDSYSMSVDENWKPIWERVKKAVERQTLRVPLLLEFDGVGKNWAEAKGLIDVH

SEQ ID NO: 125 - protein, 633 aa, Vibrio phage CJY
MRLDWERTGRRMGFIDLTKYEAWAYDTECTGLKYKVDKVFGFSIATPDGQSGYFDIREQPDAVQWLIEQADSYKGTIVCHNASFDYRMSLHSGIKLPLSQIDDTGIRACCINEHESTIFPWTRGKAGDYSLDYLAKKYVGAQKYAEIYDELAAMFGGKATRKTQMPNLYRAPSGLVRKYACPDAELTLELWLEQQELIAKRGLEKIVAFERKVMPTLIRAEARGVRVDLNYAEQAILKMDGVVRENQAKMFQLAGREFNPNSPKQVREVFGAKEERGVWTSRDGTVLERTATGNPCLDADALRAMKDPLAAAVLELRSNIKTKDTFLAKHVVEHSVGGRVYPNINQMKGEDGGTGTGRLSYTGPALQQIPSRNKRIAAIIKPAFLPEEGQLWLDSDMASFEVRIFAHLVAAYNPAIARAYAENPELDLHQWVGDLMGIPRNASYSGQANAKQMNLGMIFNRGDGAVADSLGMPWEWCEFTDKKGDLIRYKKAGPEAKAVIAAYHTQIQGVKTLATRAQKIAEERGWIQTAHGRRLRFPNGYKSYKASGILIQATAADENKENWLRIEDALGSDGSMILNTHDSYSMSVDENWKPIWERVKKAVERQTLRVPLLLEFDGVGKNWAEAKGLIDVH

SEQ ID NO: 126 - protein, 633 aa, Vibrio phage H1
MRLDWERTGRRMGFIDLTKYEAWAYDTECTGLKYKVDKVFGFSVATPDGQSGYFDIREQPDAVQWLIEQADSYKGTIVCHNASFDYRMSLHSGIKLPLSQIDDTGIRACCINEHESTIFPWTRGKAGDYSLDYLAKKYVGAQKYAEIYDELAAMFGGKATRKTQMPNLYRAPSGLVRKYACPDAELTLELWLEQQELIAKRGLEKIVAFERKVMPTLIRAEARGVRVDLNYAEQAILKMDGVVRENQAKMFQLAGREFNPNSPKQVREVFGAKEERGVWTSRDGTVLERTATGNPCLDADALRAMKDPLAAAVLELRSNIKTKDTFLAKHVVEHSVGGRVYPNINQMKGEDGGTGTGRLSYTGPALQQIPSRNKRIAAIIKPAFLPEEGQLWLDSDMASFEVRIFAHLVAAYNPAIARAYAENPELDLHQWVGDLMGIPRNASYSGQANAKQMNLGMIFNRGDGAVADSLGMPWEWCEFTDKKGDLIRYKKAGPEAKAVIAAYHTQIQGVKTLATRAQKIAEERGWIQTAHGRRLRFPNGHKSYKASGILIQATAADENKENWLRIEDALGSDGSMILNTHDSYSMSVDENWKPIWERVKKAVERQTLRVPLLLEFDGVGKNWAEAKGLIDVH

SEQ ID NO: 127 - protein, 633 aa, Vibrio phage H2 SGB-2014; identical to SEQ ID NO: 124

SEQ ID NO: 128 - protein, 633 aa, Vibrio phage H3; identical to SEQ ID NO: 126

SEQ ID NO: 129 - protein, 633 aa, Vibrio phage J3; identical to SEQ ID NO: 126

SEQ ID NO: 130 - protein, 703 aa, Arthrobacter phage Immaculata
MRFRTRINQILPSDLLDLYKRGITPGSSMSVDTETSGLRTDEGARISTVSIAWLDPDEEWKFVPNDIWPSGISTNRKEPVHEGQPDITVVSFAWPFDQGVSGTGKPEDHGQATLWPDAENLPLSEWVALLEFIRLVGESHSLDMQNSKFDCHMFRAGCRRWPGIGDDFMELVSWDTQNGNDLVFGFLPSTSLKGPGTATEFLWGAQESDEKHVISEYLKKKKLPKGRWDLMPWDIIAKYADQDARLTTRLKAVQLDWILDGGVPWMDGKQGRLEASEAFQRRMNMTYLLYRMEKRGLPFDIEEAQQASAELKRRAATFGKELPFKPATLDMAKHYWFGAGIKHGVNGLGHPPVATTDGGAPSLTANDLGKLILQDLPGAAEWRNFAKCQDADSRWYEGWLNKAGSDGRLRTSVRQNGTRSGRFSVEGIQLQAIPQNYKLSGYEGMDGIPSPRALIGSAVAKMPGWEMWELDLANAELRVAALFAKCQRMLDMIDQGMDLHGETAKELFNASEDDENWDQRRSIAKRANFSLIFGVGWATLQQNIEVNTGIILSDREAQVLVKDWNALYPEYKRAINLHMSKIEKRQKDRREVAGYLQMSNGERRWFAKHEDTHKGFNQRVQPSLAQFGINWWTLADKYISSQLTEEELEVGGTVLLVHDSMVLLLPSDRAKAIIDRVIEIGVELWAETFPGVPGGVDAKPWNK

SEQ ID NO: 131 - protein, 705 aa, Arthrobacter phage RAP15
MRFRTRISQILPSDLLDLYKRGITPGSSMSVDTETSGLRTDEGARISTVSIAWLDPDEEWKFVPNDIWPSGISTNRKEPVHEGQPDITVISFAWPFDQGVSGTGKPEDHGQATLWPDAENLPLSEWVALLEFIRLVGESHSLDMQNSKFDCHMFRAGCRRWPGIGDDFMGLVSWDTQNGNDLVFGFLPSTSLKGPGTATEFLWGAQESDEKHVISEYLKKKKLPKGRWDLMPWDIIAKYADQDARLTTRLKAVQLDWILDGGVPWMDGKQGRLEASEAFQRRMNMTYLLYRMEKRGLPFDIEEAQQASAELKRRAATFGKELPFKPATLDMAKHYWFGAGVKHGVNGLGHPPVATTEGGAPSLTANDLGKLILQDLPGAAVWRNFAKCQDADSRWYEGWLNKAGSDGRLRTSVRQNGTRSGRFSVEGIQLQAIPQNYKLSGYEGMDGIPSPRALIGSAVAKMPGWEMWELDLANAELRVAALFAKCQRMLDMIDQGMDLHGETAKELFNASEDDENWDQRRSIAKRANFSLIFGVGWATLQQNIEVNTGIILSDREAQVLVKDWNALYPEYKRAINEHMARIERRQKDRREVAGYLQMSNGERRWFAKHEDTHKGFNQRVQPSLAQFGINWWTLADKYISSQLTEEELEVGGTVLLVHDSMVLLLPNDRAKAIIDRVIEIGVELWAETFPGVPGGVDAKIWNGGK

SEQ ID NO: 132 - protein, 699 aa, Arthrobacter phage Vulture
MARERLLPSDLLGYVKAGLLPGSSMAVDTETSGLRTDEGARVSTVSVAWLDEDNEWSFVKTEQWDSGISTNRFEQVYPGFPDIRVISFAWPFDQGVSGTGKPEDNGQATLWPDADNLPLSEWLALLEFIEFVGDRMSLDFQNAKFDLHMFRAGVRRWPGVGQDFIEQLQWDTQNGNDLVFGFLPSTSLKGPGTATEHLWGAQESDEKHVISEYLKKKKLPKGRWDLMPWDIIAKYADQDARLTVRLKHVQQDKILYGGVPWMDGKQGRMEASEAFQRRMNMTRLLYRMEKRGLPFHVEQAQHWSAELKKRAADFAKQLPFKPATLDMAKHYWFGEGTKQGVEGLGHPPVSTTEKGAPSLTANDVGKLILQDLPGAGAWRNFAKCQDADVRWYEGWITKAGPDGRLRTSVRQNGTRSGRFSVEGIQLQAIPQNYKLSGYEGMDGIPSPRALIGAGVAEMPGWEMWELDLANAELRVAALFAGCQRMLDMIDQGMDLHGQTAIDLFDASEDDENWDQRRSIAKRANFSLIFGVGWATLQENIEVNTGIVLSDREAQVLVKDWNALYPEYKRAINAHMDRIEKRRRNRKGPAGYLQMSNGERRWFSEFEDTHKGFNQRVQPSLAQYGIDWWSASDEFISSQLTEEELEVGGTVLLVHDSMVLLLPSDRAEAIIERVIQIGVDLWSTRFVGVPGGVDAKPWNK

SEQ ID NO: 133 - protein, 702 aa, Arthrobacter phage Greenhouse
MVVMPERVLPSDLLHLMNKHEIFPTSIVAVDTETSGLRTDEGARISTVSVAWADPSGEWDFVQTEQWPSGISTYREEPIYEGWPDCPVVSFAWPFDQGVSGTGKPEDNGQETLWPDAENLPLSEYMALLEFIMIAGEDHGLTMQNMKFDLHQFRAGVRRWPGIGDDFVDLVKWDTQNGNDLIYGYLPSTSLKGPGTATEHLWGAAESDEKHVISAYLTKKKLPKGRWDLMPWDVIAKYADQDARLTVRLALRQEDDIKNGKVSWMDGKQGRMTAQQAMDRRMNMTRLLYAMEKRGLPFDIEEAQIASAELKFRAKQFAKDLPFKPATLDMAKHYWFGTGLKQGVVGLEQPPVATTAGGAPSLTAHDLGKLILQDLPGASVWRNFAKCTDADSRWYEGWVTKAGADGRLRTSVRQNGTRSGRFSVEGIQLQAIPQNYKLSGYEGMDDIPSPRALIGSAVAKMPDWEMWELDLANAELRVAALFAGCQRMLDMIDKGMDLHGETAKELFDASEDDENWDQRRSIAKRANFSLIFGVGWATLQQNIEVNTGIVLSDREAQVLVKDWNGLYPEYKRAINVHMDRIATRQKSKKELGGYLQMSNGERRWFASHEDTHKGFNQRVQPSLAQFGIDWWTLADAYISSQLTPEELEHGGTVLLVHDSMVLLLPKDRAERIIEEVIRIGVELWSRTFVGVPGGVDAKPWNK

SEQ ID NO: 134 - protein, 702 aa, Arthrobacter phage Oxynfrius
MVVMPERVLPSDLLHLMNKHEIFPTSIVAVDTETSGLRTDEGARISTVSVAWADPSGEWDFVQTEQWPSGISTYREEPIYEGWPDCPVVSFAWPFDQGVSGTGKPEDSGQETLWPDAENLPLAEYMALLEFIMIAGEDHGLTMQNMKFDLHQFRAGVRRWPGIGDDFVDLVKWDTQNGNDLIYGYLPSTSLKGPGTATEHLWGAAESDEKHVISAYLTKKKLPKGRWDLMPWDVIAKYADQDARLTVRLALRQEDDIKNGKVSWMDGKQGRMTAQQAMDRRMNMTRLLYAMEKRGLPFDIEEAQIASAELKFRAKQFAKDLPFKPATLDMAKHYWFGTGLKQGVVGLEQPPVATTAGGAPSLTAHDLGKLILQDLPGASVWRNFAKCTDADSRWYEGWVTKAGADGRLRTSVRQNGTRSGRFSVEGIQLQAIPQNYKLSGYEGMDDIPSPRALIGSAVAKMPDWEMWELDLANAELRVAALFAGCQRMLDMIDKGMDLHGETAKELFDASEDDENWDQRRSIAKRANFSLIFGVGWATLQQNIEVNTGIVLSDREAQVLVKDWNGLYPEYKRAINVHMDRIATRQKSKKELGGYLQMSNGERRWFASHEDTHKGFNQRVQPSLAQFGIDWWTLADAYISSQLTPEELEHGGTVLLVHDSMVLLLPKDLAEKIIEEVIRIGVELWSRTFVGVPGGVDAKPWNK

SEQ ID NO: 135 - protein, 699 aa, Arthrobacter phage Suppi
MARVRLLPSDLLGYAKAGLLPGSSMAVDTETSGLRVDEGARISTVSISWLDEDNEWSFVQNEQWPSGISTNRKEPVLEGWPDVRVVSFAWPFDQGVSETGKPEDNGQATLWPDAENLPLTEWLALLDFIEFVGERLSLDMQNMKFDLHQFRAGVRRWPGVGREFEHLVEWDTQNGNDLVFGFLPSTSLKGPGTATEHLWGEQESDEKHVISEYLKKKKLPKGRWDLMPWDVIAKYADQDARLTVRLKHVQQDKILSGGVPWMDGKKGRMDASEAFLRRMNMTRLLYRMEKRGLPFDIEEAELASAELKRRAKEFGKGLPFKPATLDMAKHYWFGSGIKQGVEGLGQPPIATTATGAPSLTANDLGKLILQELPGAAAWRNFAKCQDADSRWYEGWLTKAGGDGRLRTSVRQNGTRSGRFSVEGIQLQAIPQNYKLSGYEGMDGIPSPRALIGSAVAKMPGWEMWELDLANAELRVAALFAKCQRMLDMIDQGMDLHGETAKELFNAAEDDENWDQRRSIAKRANFSLIFGVGWETLQQNIEVNTGIVLSDREAQVLVKDWNALYPEYKRAINAHMARIEQRQKKELGGYLQMSNGERRWFARHEDTHKGFNQRVQPSLAQYGIDWWTISDEFISSQLTEEELEVGGTVLLVHDSMVLLLPSDRAEGIINQVIDLGVGLWSERFPGVPGGVDAKIWNGGK

SEQ ID NO: 136 - protein, 703 aa, Arthrobacter phage Vallejo
MKFRTRISQILPSDLLDLYKRGVTPGSSMSVDTETSGLRTDEGARISTVSIAWLDPDEEWKFVPNDIWPSGISTNRKEPVHEGQPDITVVSFAWPFDQGVSGTGKPEDHGQATLWPDAENLPLSEWVALLEFIRLVGDSHSLDMQNSKFDCHMFRAGCRRWPGIGDDFMELVSWDTQNGNDLVFGFLPSTSLKGPGTATEFLWGAQESDEKHVISEYLKKKKLPKGRWDLMPWDIIAKYADQDARLTTRLKAVQLDWILDGGVPWMDGKQGRMEASEAFQRRMNMTYLLYRMEKRGLPFDIEEAQLASMELKWRAKNFAKDLPFKPATLDMAKHYWFGAGIKHGVNGLGHPPVATTDGGAPSLTANDLGKLILQDLPGAAVWRNFAKCQDADSRWYEGWLNKAGSDGRLRTSVRQNGTRSGRFSVEGIQLQAIPQNYKLSGYEGMDGIPSPRALIGSAVAKMPGWEMWELDLANAELRVAALFAKCQRMLDMIDQGMDLHGETAKELFNASEDDENWDQRRSIAKRANFSLIFGVGWATLQQNIEVNTGIILSDREAQVLVKDWNALYPEYKRAINEHMARIERRQKDRREVAGYLQMSNGERRWFAKHEDTHKGFNQRVQPSLAQFGINWWTLADKYISSQLTEEELEVGGTVLLVHDSMVLLLPNDRAKAIIDRVIEIGVELWAETFPGVPGGVDAKPWNK

SEQ ID NO: 137 - protein, 699 aa, Arthrobacter phage Lucy
MALKRLLPSDLLGYAKAGLLPGSSMAVDTETSGLRVDQGARISTVSVAWLDPDNEWSLVQTEQWPSGISTNRFEPVYEGKPDIRVISFAWPFDQGVSGTGKPEDNGQATLWPDAENLPLSEWVALLEFIELVGDQLSLDMQNMKFDLHQFRAGVRRWPGVGQDFIDQVEWDTQNGNDLVFGFLPSTSLKGPGTAVEFLWGAEESDEKHIISEYLKKKKLPKGRWDLMPWDIIAKYADQDARLTVRLKHVQQDWILDEGVPWMDGKNGRLEASEAFQRRMNMTRLLYRMEKRGLPFDIEEAQQASAELKRRAATFGKELPFRPATLDMAKHYWFGAGIKHGVNGLGHPPVATTDGGAPSLTANDLGKLILQDLPGAAVWRNFAKCQDADSRWYEGWVTKAGADGRLRTSVRQNGTRSGRFSVEGIQLQAIPQNYKLSGYEGMDGIPSPRALIGSAVAKMPGWEMWELDLANAELRVAALFAKCQRMLDMIDQGMDLHGETAKELFNASEDDENWDQRRSIAKRANFSLIFGVGWATLQQNIEVNTGIILSDREAQVLVKDWNALYPEYKRAINLHMSKIEKRQKDRREVAGYLQMSNGERRWFAKHEDTHKGFNQRVQPSLAQFGINWWTLADKYIESMLTEEELEVGGTVLLVHDSMVLLLPSDRAKEIINRVIEIGVQLWSETFPGVPGGVDAKPWNK

SEQ ID NO: 138 - protein, 701 aa, Arthrobacter phage RcigaStruga
MVVMPERVLPSDLLHLYKHGITPGSSMAVDTETSGLRVDEGARISTVSVAWLDEDNEWDFIQTEQWPSGISTNRMEPVHEGFPDVRVISFAWPFDQGVSNTGKPEDNGQETLWPDAENLPLSEWTALLEFIRLVGESHSLDMQNAKFDCHQFRAGVRRWPGIGDDFMELVEWDTQNGNDLVFGYLPSTSLKGPGTATEHLWGEGESDEKHVISAYLTKKKLPKGRWDLMPWDVIAKYADQDARLTVRLKHVQQDKILYGGVPWMDGKQGRMTADEAFLRRMNMTRLLFAMEKRGLPFDIEEAERASAELKRRAKSFAQDLPFKPATLDMAKHYWFGTGLKQGVVGLEQPPVATTEGGAPSLTAHDLGKLILQDLPGASVWRNFAKCQDADSRWYEGWVTKAGADGRLRTSVRQNGTRSGRFSVEGIQLQAIPQNYKLSGYEGMDDIPSPRALIGSAVAKMPDWEMWELDLANAELRVAALFAGCQRMLDMIDKGMDLHGETAKELFDASEDDENWDQRRSIAKRANFSLIFGVGWATLQQNIEVNTGIVLSDREAQVLVKDWNGLYPEYKRAINIHMDRIATRQKSKKELGGYLQMSNGERRWFASHEDTHKGFNQRVQPSLAQFGIDWWTLADAYITSQLTPEELEHGGTVLLVHDSMVLLLPKDRAEEIIEEVIRIGVELWSRTFVGVPGGVDAKPWNK

SEQ ID NO: 139 - protein, 703 aa, Arthrobacter phage Bennie
MGWDRAAFRTTPSELLELYRRGLTPGSSMSVDTETSGLRTDEGARISTVSIGWLDPDNEWEFIQNEVWPSGIATNRMEEVWEGQPEVRVISFAWPFDQGVSGTGKPEDNGQATLWPDAENLPLEEWVALLEFIRLVGESHSLDMQNAKFDCHMFRAGCRRWPGVGDDFMELVSWDTQNGNDLVFGFLPSTSLKGPGTATEFLWGAQESDEKHVISEYLKKKKLPKGRWDLMPWDIIAKYADQDARLTTRLKAVQQDWILDGGVPWMDGKQGRMEASEAFQRRMNMTYLLYRMEKRGLPFDVDSALHYSMELKRRAKEFAKDLPFKPATLDMAKHYWFGSGLKQGVEGLGHPPVATTEGGAPSLTANDLGKLIAQDLPGAAVWRNFAKCQDADSRWYEGWVNKAGDDDRLRTSVRQNGTRSGRFSVEGIQLQAIPQNYKLSGYEGMDGIPSPRALIGSAVARMQGWEMWELDLANAELRVAALFAKCQRMLDMIDQGMDLHGETAKELFNASEDDENWDQRRSIAKRANFSLIFGVGWATLQQNIEINTGIVLSDREAQVLVKDWNALYPEYKRAINVHMAKIEKRQKDRNEVAGYLQMANGERRWFAKHEDTHKGFNQRVQPSLAQFGINWWTLADEYISSQLTPEELEHGGTVLLVHDSMVLLLPSDRATMIIDRVIEIGVELWAETFPGVPGGVDAKPWNK

SEQ ID NO: 140 - protein, 704 aa, Arthrobacter phage DrRobert
MGDIVRGARLLPSDLLALYQMGVNTPGSSMSVDTETSGLRTDEGARISTVSIAWLDETDDWEFVRSEVWPSGISTNRKEPVYEGKPDIRVISFAWPFDQGVSGTGKPEDNGQATLWPDAENLPLSEWTALLEFIRLVGGSHSLDMQNSKFDCHMFRAGCRRWPGIGDDFMQFVEWDTQNGNDLVFGFLPSTSLKGPGTAVEFLWGAEESDEKHVISEYLKKKKLPKGRWDLMPWDIIAKYADQDARLTTRLKAVQQDWILDEGVPWMDGKNGRLEASEAFLRRMNMTYLLYRMEKRGLPFDIEEAQQASAELKRRAATFGKELPFKPATLDMAKHYWFGAGIKHGVNGLGHPPVATTDGGAPSLTANDLGKLILQDLPGAAVWRNFAKCQDADSRWYEGWLTKAGADGRLRTSVRQNGTRSGRFSVEGIQLQAIPQNYKLSGYEGMDGIPSPRALIGSAVAKMPGWEMWELDLANAELRVAALFAKCQRMLDMIDQGMDLHGETAKELFNASEDDENWDQRRSIAKRANFSLIFGVGWATLQQNIEVNTGIILSDREAQVLVKDWNALYPEYKRAINLHMSKIEKRQKDRREVAGYLQMSNGERRWFAKHEDTHKGFNQRVQPSLAQFGINWWTLADKYIESMLTEEELEVGGTVLLVHDSMVLLLPSDRAKEIIDRVIEIGVQLWAETFPGVPGGVDAKPWNK

SEQ ID NO: 141 - protein, 703 aa, Arthrobacter phage Glenn
MKFRTRISQILPSDLLDLYKRGVTPGSSMSVDTETSGLRTDEGARISTVSIAWLDPDEEWKFVPNDIWPSGISTNRKEPVHEGQPDITVVSFAWPFDQGVSGTGKPEDHGQATLWPDAENLPLSEWVALLEFIRLVGDSHSLDMQNSKFDCHMFRAGCRRWPGIGDDFMELVSWDTQNGNDLVFGFLPSTSLKGPGTATEFLWGAQESDEKHVISEYLKKKKLPKGRWDLMPWDIIAKYADQDARLTTRLKAVQLDWILDGGVPWMDGKQGRMEASEAFQRRMNMTYLLYRMEKRGLPFDIEEAQLASMELKWRAKNFAKDLPFKPATLDMAKHYWFGAGIKHGVNGLGHPPVATTDGGAPSLTANDLGKLILQDLPGAAVWRNFAKCQDADSRWYEGWLNKAGSDGRLRTSVRQNGTRSGRFSVEGIQLQAIPQNYKLSGYEGMDGIPSPRALIGSAVAKMPGWEMWELDLANAELRVAALFAKCQRMLDMIDQGMDLHGETAKELFNASEDDENWDQRRSIAKRANFSLIFGVGWATLQQNIEVNTGIILSDREAQVLVKDWNALYPEYKRAINEHMARIERRQKDRREVAGYLQMSNGERRWFAKHEDTHKGFNQRVQPSLAQFGINWWTLADKYISSQLTEEELEVGGTVLLVHDSMVLLLPNDRAKAIIDRVIEIGVELWAETFPGVPGGVDAKEWNR

SEQ ID NO: 142 - protein, 699 aa, Arthrobacter phage HunterDalle; identical to SEQ ID NO: 132

SEQ ID NO: 143 - protein, 702 aa, Arthrobacter phage Joann
MVVMPERVLPSDLLHLMNRHEIFPTSIVAVDTETSGLRTDEGARISTVSVAWADPSGEWDFVQTEQWPSGISTYREEPIFEGWQDCPVVSFAWPFDQGVSGTGKPEDNGQETLWPDAENLPLSEYMALLEFIMIAGEDHGLTMQNMKFDLHQFRAGVRRWPGIGDDFVDLVKWDTQNGNDLIYGYLPSTSLKGPGTATEHLWGAAESDEKHVISAYLTKKKLPKGRWDLMPWDVIAKYADQDARLTVRLALRQEDDIKNGKVSWMDGKQGRMTAQQAMDRRMNMTRLLYAMEKRGLPFDIEEAQIASAELKFRAKQFAKDLPFKPATLDMAKHYWFGTGLKQGVVGLEQPPVATTAGGAPSLTAHDLGKLILQDLPGASVWRNFAKCTDADSRWYEGWVTKAGADGRLRTSVRQNGTRSGRFSVEGIQLQAIPQNYKLSGYEGMDDIPSPRALIGSAVAKMPDWEMWELDLANAELRVAALFAGCQRMLDMIDKGMDLHGETAKELFDASEDDENWDQRRSIAKRANFSLIFGVGWATLQQNIEVNTGIVLSDREAQVLVKDWNGLYPEYKRAINVHMDRIATRQKSKKELGGYLQMSNGERRWFASHEDTHKGFNQRVQPSLAQFGIDWWTLADAYISSQLTPEELEHGGTVLLVHDSMVLLLPKDRAERIIEEVIRIGVELWSRTFVGVPGGVDAKPWNK

SEQ ID NO: 144 - protein, 703 aa, Arthrobacter phage Korra
MRFRTRISQILPSDLLDLYKRGITPGSSMSVDTETSGLRTDEGARISTVSIAWLDPDEEWKFVPNDIWPSGISTYRKEPVHEGQPDITVVSFAWPFDQGVSGTGKPEDHGQATLWPDAENLPLSEWVALLEFIRLVGESHSLDMQNSKFDCHMFRAGCRRWPGIGDDFMELVSWDTQNGNDLVFGFLPSTSLKGSGTATEFLWGAQESDEKHVISEYLKKKKLPKGRWDLMPWDIIAKYADQDARLTTRLKAVQLDWILDGGVPWMDGKQGRMEASEAFQRRMNMTYLLYRMEKRGLPFDIEEAQQASAELKRRAATFGKELPFKPATLDMAKHYWFGAGIKHGVNGLGHPPVATTEGGAPSLTANDLGKLILQDLPGAAVWRNFAKCQDADSRWYEGWLNKAGSDGRLRTSVRQNGTRSGRFSVEGIQLQAIPQNYKLSGYEGMDGIPSPRALIGSAVAKMPGWEMWELDLANAELRVAALFAKCQRMLDMIDQGMDLHGETAKELFNASEDDENWDQRRSIAKRANFSLIFGVGWATLQQNIEVNTGIILSDREAQVLVKDWNALYPEYKRAINEHMARIERRQKDRREVAGYLQMSNGERRWFAKHEDTHKGFNQRVQPSLAQFGINWWTLADKYISSQLTEEELEVGGTVLLVHDSMVLLLPNDRAKAIIDRVIEIGVELWAETFPGVPGGVDAKPWNK

SEQ ID NO: 145 - protein, 704 aa, Arthrobacter phage Preamble
MGDIMRGARLLPSDLLALYQMGVNTPGSSMAVDTETSGLRTDEGARISTVSIAWLDPTDDWEFVQSEVWPSGISTNRKEPVYEGKPDIRVISFAWPFDQGVSGTGKPEDNGQATLWPDAENLPLSEWAALLEFIRLVGESHSLDMQNSKFDCHQFRAGVRRWPGVVEDFMQYVEWDTQNGNDLVFGFLPSTSLKGPGTAVEFLWGAEESDEKHVISEYLKKKKLPKGRWDLMPWDIIAKYADQDARLTSRLKHVQQDWILDEGVPWMDGKNGRLEASEAFQRRMNMTRLLYRMEKRGLPFDIEEAQSASTELKRRAASFGKDLPFRPATLDMAKHYWFGAGIKQGVNGLGHPPVATTAGGAPSLTANDLGKLILQDLPGAAVWRNFAKCQDADSRWYEGWITKAGADGRLRTSVRQNGTRSGRFSVEGIQLQAIPQNYKLSGYEGMDGIPSPRALIGSAVAKMPGWEMWELDLANAELRVAALFAKCKRMLEMIESGMDLHGETAKELFNASEDDENWDQRRSIAKRANFSLIFGVGWATLQQNIEVNTGIILSDREAQVLVKDWNALYPEYKRAINLHMSKIEKRQKDRREVAGYLQMSNGERRWFAKHEDTHKGFNQRVQPSLAQYGINWWTLADEFISNQLTPEELEVGGTVLLVHDSMVLLLPSDRAKAIIDRVIEIGVELWGKTFPGVPGGVDAKPWNK

SEQ ID NO: 146 - protein, 699 aa, Arthrobacter phage Pumancara
MRRERLLPSDLLSYAKAGLVPGSSMAVDTETSGLRTDEGARVSTVSIAWLDPDDEWAWVRSEQWASGISTNRHEAVIEGWPDQRVISFAWPFDQGVSGTGKPEDNGQTTLWPDAENLPLPEWLALLEFIGLIGDSHGLDFQNAKFDLHQFRAGVRRWPGVGRDFIDQLAWDTQNGNDLVFGFLPSTSLKGPGTATEYLWGEQESDEKHVISEYLKKKKLPKGRWDLMPWDVIAKYADQDARLTSRLKAVQQDRILSGGVPWMDGKQGRMDASEAFLRRMNMTRLLYRMEKRGLPFHVEQAQHWSAELKRRAAEFARLLPFKPATLDMAKHYWFGEGVKQGVEGLGQPPVSTTEKGAPSLTANDVGKLIAQELPGAVAWRNFAKCQDADSRWYEGWVTKAGPDGRLRTSVRQNGTRSGRFSVEGIQLQAIPQNYKLSGYEGMDGIPSPRALIGAAVAEMPGWEMWELDLANAELRVAALFAKCQRMLDMIDAGMDLHGETAKELFNASEEDENWDQRRSIAKRANFSLIFGVGWATLQENIEVNTGIVLSDREAQVLVKDWNALYPEYKRAINQHMDRIDRRQKSRKELGGYLQMANGERRWFAKHEDTHKGFNQRVQPSLAQFGINWWTLSDQFISEQLTEEELEIGGTVLLVHDSMVLLLPSDRAKMVIDGVIQIGVDLWEQTFTGVPGGVDAKPWNK

SEQ ID NO: 147 - protein, 699 aa, Arthrobacter phage Canowicakte; identical to SEQ ID NO: 135

SEQ ID NO: 148 - protein, 704 aa, Arthrobacter phage Christian
MGDIVRGARLLPSDLLALYQLGVNTPGSSMSVDTETSGLRTDEGARISTVSIAWLDETDDWEFVRSEVWPSGISTNRKEPVYEGKPDIRVISFAWPFDQGVSGTGKPEDYGQETLWPDAENLPLSEWTALLEFIRLVGDSHSLDMQNSKFDCHMFRAGCRRWPGIGDDFMKFVEWDTQNGNDLVFGFLPSTSLKGPGTAVEFLWGAEESDEKHVISEYLKKKKLPKGRWDLMPWDIIAKYADQDARLTTRLKAVQQDWILDEGVPWMDGKNGRLEASEAFLRRMNMTRLLYRMEKRGLPFDIEEAQQASAELKRRAATLGKELPFKPATLDMAKHYWFGAGIKHGVNGLGHPPVATTDGGAPSLTANDLGKLILQDLPGAAVWRNFAKCQDADSRWYEGWLTKAGADGRLRTSVRQNGTRSGRFSVEGIQLQAIPQNYKLSGYEGMDGIPSPRALIGSAVAKMPGWEMWELDLANAELRVAALFAKCQRMLDMIDQGMDLHGETAKELFNASEDDENWDQRRSIAKRANFSLIFGVGWATLQQNIEVNTGIILSDREAQVLVKDWNALYPEYKRAINLHMSKIEKRQKDRREVAGYLQMSNGERRWFAKHEDTHKGFNQRVQPSLAQFGINWWTLADKYIESMLTEEELEVGGTVLLVHDSMVLLLPSDRAKEIIDRVIEIGVQLWSETFPGVPGGVDAKPWNK

SEQ ID NO: 149 - protein, 703 aa, Arthrobacter phage Dino
MKFRTRISQILPSDLLDLYKRGVTPGSSMSVDTETSGLRTDEGARISTVSIAWLDPDEEWKFVPNDIWPSGISTNRKEPVHEGQPDITVVSFAWPFDQGVSGTGKPEDHGQATLWPDAENLPLSEWAALLEFIRLVGDSHSLDMQNSKFDCHMFRAGCRRWPGIGDDFMELVSWDTQNGNDLVFGFLPSTSLKGPGTATEFLWGAQESDEKHVISEYLKKKKLPKGRWDLMPWDIIAKYADQDARLTTRLKAVQLDWILDGGVPWMDGKQGRMEASEAFQRRMNMTYLLYRMEKRGLPFDIEEAQLASMELKWRAKNFAKDLPFKPATLDMAKHYWFGAGIKHGVNGLGHPPVATTDGGAPSLTANDLGKLILQDLPGAAVWRNFAKCQDADSRWYEGWLTKAGSDGRLRTSVRQNGTRSGRFSVEGIQLQAIPQNYKLSGYEGMDGIPSPRALIGSAVAKMPGWEMWELDLANAELRVAALFAKCQRMLDMIDQGMDLHGETAKELFNASEDDENWDQRRSIAKRANFSLIFGVGWATLQQNIEVNTGIILSDREAQVLVKDWNALYPEYKRAINEHMARIERRQKDRREVAGYLQMSNGERRWFAKHEDTHKGFNQRVQPSLAQFGINWWTLADKYISSQLTEEELEVGGTVLLVHDSMVLLLPNDRAKAIIDRVIEIGVELWAETFPGVPGGVDAKPWNK

SEQ ID NO: 150 - protein, 702 aa, Arthrobacter phage Nubia
MVVMPERVLPSDLLHLMNRHEIFPTSIVAVDTETSGLRTDEGARISTVSVAWADPSGEWDFVQNEQWPSGISTYREEPIFEGWQDCPVVSFAWPFDQGVSGTGKPEDSGQETLWPDAENLPLAEYMALLEFIMIAGEDHGLTMQNMKFDLHQFRAGVRRWPGIGDDFVDLVKWDTQNGNDLVYGYLPSTSLKGPGTATEHLWGAAESDEKHVISAYLTKKKLPKGRWDLMPWDVIAKYADQDARLTVRLALRQEDDIKNGKVSWMDGKQGRMTAQQAMDRRMNMTRLLYAMEKRGLPFDIEEAERASAELKRRAKTFAQDLPFKPATLDMAKHYWFGTGLKQGVVGLEQPPVATTAGGAPSLTAHDLGKLILQDLPGASVWRNFAKCTDADSRWYEGWVTKAGADGRLRTSVRQNGTRSGRFSVEGIQLQAIPQNYKLSGYEGMDDIPSPRALIGSAVAKMPDWEMWELDLANAELRVAALFAGCQRMLDMIDKGMDLHGETAKELFDASEDDENWDQRRSIAKRANFSLIFGVGWATLQQNIEVNTGIVLSDREAQVLVKDWNGLYPEYKRAINVHMDRIATRQKSKKELGGYLQMSNGERRWFASHEDTHKGFNQRVQPSLAQFGIDWWTLADAYITSQLTPEELEHGGTVLLVHDSMVLLLPKDRAERIIEEVIRIGVELWSRTFVGVPGGVDAKPWNK

SEQ ID NO: 151 - protein, 699 aa, Arthrobacter phage PitaDog
MALKRLLPSDLLGYAKAGLLPGSSMAVDTETSGLRVDQGARISTVSVAWLDPDDEWSLVQTEQWPSGISTNRLEPVYEGKPDIRVISFAWPFDQGVSGTGKPEDNGQATLWPDAENLPLSEWVALLEFIELVGDQLSLDMQNMKFDLHQFRAGVRRWPGVGQDFIDQVEWDTQNGNDLVFGFLPSTSLKGPGTAVEFLWGAEESDEKHIISEYLKKKKLPKGRWDLMPWDIIAKYADQDARLTVRLKHVQQDWILDEGVPWMDGKNGRLEASEAFQRRMNMTRLLYRMEKRGLPFDIEEAQQASAELKRRAATFGKELPFRPATLDMAKHYWFGAGIKHGVNGLGHPPVATTDGGAPSLTANDLGKLILMDLPGAAVWRNFAKCQDADSRWYEGWVTKAGADGRLRTSVRQNGTRSGRFSVEGIQLQAIPQNYKLSGYEGMDGIPSPRALIGSAVAKMPGWEMWELDLANAELRVAALFAKCQRMLDMIDQGMDLHGETAKELFNASEDDENWDQRRSIAKRANFSLIFGVGWATLQQNIEVNTGIILSDREAQVLVKDWNALYPEYKRAINLHMSKIEKRQKDRREVAGYLQMSNGERRWFAKHEDTHKGFNQRVQPSLAQFGINWWTLADKYIESMLTEEELEVGGTVLLVHDSMVLLLPSDRAKEIIDRVIEIGVELWAETFPGVPGGVDAKPWNK

SEQ ID NO: 152 - protein, 699 aa, Arthrobacter phage Temper16
MRRERLLPSDLLSYAKAGLVPGSSMAVDTETSGLRTDEGARVSTVSIAWLDPDNEWAWVRSEQWASGISTNRQEAVIEGWPDQRVISFAWPFDQGVSGTGKPEDNGQTTLWPDAENLPLPEWLALLEFIGLIGDSHGLDFQNAKFDLHQFRAGVRRWPGVGRDFIDQLAWDTQNGNDLVFGYLPSTSLKGPGTATEHLWGEQESDEKHVISEYLKKKKLPKGRWDLMPWDVIAKYADQDARLTSRLKAVQQDRILSGGVPWMDGKQGRMDASEAFLRRMNMTRLLYRMEKRGLPFHVEQAMHWSAELKRRAAEFARLLPFKPATLDMAKHYWFGEGVKQGVEGLGQPPVSTTEKGAPSLTANDVGKLIAQELPGAVAWRNFAKCQDADSRWYEGWVTKAGPDGRLRTSVRQNGTRSGRFSVEGIQLQAIPQNYKLSGYEGMDGVPSPRALIGAAVAEMPGWEMWELDLANAELRVAALFAKCQRMLDMIDAGMDLHGETAKELFNASEEDENWDQRRSIAKRANFSLIFGVGWATLQENIEINTGIVLSDREAQVLVKDWNALYPEYKRAINQHMDRIDRRQKSRKELGGYLQMANGERRWFAKHEDTHKGFNQRVQPSLAQFGINWWTLSDQFISEQLTEEELEIGGTVLLVHDSMVLLLPSDRAKMVIDGVIKIGVDLWEQTFTGVPGGVDAKPWNK

SEQ ID NO: 153 - protein, 633 aa, Vibrio phage JSF15
MRLDWERTGRRMGFIDLTKYEAWAYDTECTGLKYKVDKVFGFSVATPDGQSGYFDIREQPDAVQWLIEQAESYKGTIVCHNASFDYRMSLHSGIKLPLSQIDDTGIRACCINEHESTIFPWTRGKAGDYSLDYLAKKYVGAQKYAEIYDELAAMFGGKATRKTQMPNLYRAPSGLVRKYACPDAELTLELWLEQQELIAKRGLEKIVAFERKVMPTLIRAEARGVRVDLNYAEQAILKMDGVVRENQAKMFQLAGREFNPNSPKQVREVFGAKEERGVWTSRDGTVLERTATGNPCLDADALRAMKDPLAAAVLELRSNIKTKDTFLAKHVVEHSVGGRVYPNINQMKGEDGGTGTGRLSYTGPALQQIPSRNKRIAAIIKPAFLPEEGQLWLDSDMASFEVRIFAHLVAAYNPAIARAYAENPELDLHQWVGDLMGIPRNASYSGQANAKQMNLGMIFNRGDGAVADSLGMPWEWCEFTDKKGDLIRYKKAGPEAKAVIAAYHTQIQGVKTLATRAQKIAEERGWIQTAHGRRLRFPNGYKSYKASGILIQATAADENKENWLRIEDALGSDGSMILNTHDSYSMSVDENWKPIWERVKKAVERQTLRVPLLLEFDGVGKNWAEAKGLIDVH

SEQ ID NO: 154 - protein, 622 aa, Vibrio phage JSF33
MGFIDLTKYEAWAYDTECTGLKYKVDKVFGFSVATPDGQSGYFDIREQPDAVQWLIEQAESYKGTIVCHNASFDYRMSLHSGIKLPLSQIDDTGIRACCINEHESTIFPWTRGKAGDYSLDYLAKKYVGAQKYAEIYDELAAMFGGKATRKTQMPNLYRAPSGLVRKYACPDAELTLELWLEQQELIAKRGLEKIVAFERKVMPTLIRAEARGVRVDLNYAEQAILKMDGVVRENQAKMFQLAGREFNPNSPKQVREVFGAKEERGVWTSRDGTVLERTATGNPCLDADALRAMKDPLAAAVLELRSNIKTKDTFLAKHVVEHSVGGRVYPNINQMKGEDGGTGTGRLSYTGPALQQIPSRNKRIAAIIKPAFLPEEGQLWLDSDMASFEVRIFAHLVAAYNPAIARAYAENPELDLHQWVGDLMGIPRNASYSGQANAKQMNLGMIFNRGDGAVADSLGMPWEWCEFTDKKGDLIRYKKAGPEAKAVIAAYHTQIQGVKTLATRAQKIAEERGWIQTAHGRRLRFPNGYKSYKASGILIQATAADENKENWLRIEDALGSDGSMILNTHDSYSMSVDENWKPIWERVKKAVERQTLRVPLLLEFDGVGKNWAEAKGLIDVH

SEQ ID NO: 155 - protein, 701 aa, Arthrobacter phage Huntingdon; identical to SEQ ID NO: 138

SEQ ID NO: 156 - protein, 703 aa, Arthrobacter phage Fluke
MKFRTRISQILPSDLLDLYKRGVTPGSSMSVDTETSGLRTDEGARISTVSIAWLDPDEEWKFVPNDIWPSGISTNRKEPVHEGQPDITVVSFAWPFDQGVSGTGKPEDHGQATLWPDAENLPLSEWVALLEFIRLVGDSHSLDMQNSKFDCHMFRAGCRRWPGIGDDFMELVSWDTQNGNDLVFGFLPSTSLKGPGTATEFLWGAQESDEKHVISEYLKKKKLPKGRWDLMPWDIIAKYADQDARLTTRLKAVQLDWILDGGVPWMDGKQGRMEASEAFQRRMNMTYLLYRMEKRGLPFDIEEAQQASAELKRRAATFGKELPFKPATLDMAKHYWFGAGIKHGVNGLGHPPVATTDGGAPSLTANDLGKLILQDLPGAAVWRNFAKCQDADSRWYEGWLNKAGSDGRLRTSVRQNGTRSGRFSVEGIQLQAIPQNYKLSGYEGMDGIPSPRALIGSAVAKMPGWEMWELDLANAELRVAALFAKCQRMLDMIDQGMDLHGETAKELFNASEDDENWDQRRSIAKRANFSLIFGVGWATLQQNIEVNTGIILSDREAQVLVKDWNALYPEYKRAINEHMARIERRQKDRREVAGYLQMSNGERRWFAKHEDTHKGFNQRVQPSLAQFGINWWTLADKYISSQLTEEELEVGGTVLLVHDSMVLLLPNDRAKAIIDRVIEIGVELWAETFPGVPGGVDAKPWNK

SEQ ID NO: 157 - protein, 705 aa, Arthrobacter phage MeganNoll; identical to SEQ ID NO: 131

SEQ ID NO: 158 - protein, 702 aa, Arthrobacter phage Urla
MEYTGEKLLPSDLLFLYKQAGLTPGSSMSVDTETSGLRTDEGARISTVSVGWLDEDDEWEFVNNEVWPSGISTNRTEEVWEGRPEVRVISFAWPFDQGVSGTGKREDSGQETLWPDAENLPLEEWVALLEFIRLVGESHSLDMQNAKFDCHMFRAGCRRWPGVGDDFMELVSWDTQNGNDLVFGFLPSTSLKGPGTATEFLWGAQESDEKHIISEYLKKKKLPKGRWDLMPWDIIAKYADQDARLTTRLKAVQQDWILDEGVPWMDGKQGRMTASEAFQRRMRMTYLLYRMEKRGLPFDVESAKEYSMELKWRAKQFAKDLPFKPATLDMAKHYWFGTGLKQGVEGLGHPPVATTDGGAPSLTANDLGKLIAQDLPGAAVWRNFAKCQDADSRWYEGWVNKAGADDRLRTSVRQNGTRSGRFSVEGIQLQAIPQNYKLSGYEGMDGIPSPRALIGSAVAMMQGWEMWELDLANAELRVAALFAKCQRMLDMIDQGMDLHGETAKELFNASEDDENWDQRRSIAKRANFSLIFGVGWATLQQNIEVNTGIILSDREAQVLVKDWNALYPEYKRAINVHMAKIEKRQKDRNEVAGYLQMANGERRWFAKHEDTHKGFNQRVQPSLAQFGINWWTLADEYISSRLTAEELEHGGTVLLVHDSMVLLLPSDRAKEIIDRVIEIGVELWAETFPGVPGGVDAKPWNK

SEQ ID NO: 159 - protein, 633 aa, Vibrio phage Rostov 6
MRLDWERTGRRMGFIDLTKYEAWAYDTECTGLKYKVDKVFGFSVATPDGQSGYFDIREQPDAVQWLIEQADSYKGTIVCHNASFDYRMSLHSGIKLPLSQIDDTGIRACCINEHESTIFPWTRGKAGDYSLDYLAKKYVGAQKYAEIYDELAAMFGGKATRKTQMPNLYRAPSGLVRKYACPDAELTLELWLEQQELIAKRGLEKIVAFERKVMPTLIRAEARGVRVDLNYAEQAILKMDGVVRENQAKMFQLAGKEFNPNSPKQVREVFGAKEERGVWTSRDGTILERTATGNPCLDADALRAMKDPLAAAVLELRSNIKTKDTFLAKHVVEHSVGGRVYPNINQMKGEDGGTGTGRLSYTGPALQQIPSRNKRIAAIIKPAFLPEEGQLWLDSDMASFEVRIFAHLVAAYNPAIARAYAENPELDLHQWVGDLMGIPRNASYSGQANAKQMNLGMIFNRGDGAVADSLGMPWEWCEFTDKKGDLIRYKKAGPEAKAVIAAYHTQIQGVKTLATRAQKIAEERGWIQTAHGRRLRFPNGYKSYKASGILIQATAADENKENWLRIEDALGSDGSMILNTHDSYSMSVDENWKPIWERVKKAVERQTLRVPLLLEFDGVGKNWAEAKGLIDVH

SEQ ID NO: 160 - protein, 699 aa, Arthrobacter phage Daiboju; identical to SEQ ID NO: 152

SEQ ID NO: 161 - protein, 699 aa, Arthrobacter phage Herb; identical to SEQ ID NO: 152

SEQ ID NO: 162 - protein, 699 aa, Arthrobacter phage KingBob; identical to SEQ ID NO: 152

SEQ ID NO: 163 - protein, 699 aa, Arthrobacter phage Sergei; identical to SEQ ID NO: 152

SEQ ID NO: 164 - protein, 702 aa, Arthrobacter phage Moki
MEYTGEKLLPSDLLFLYKQAGLTPGSSMSVDTETSGLRTDEGARISTVSVGWLDEDNEWEFVHNEVWPSGISTNRMEEVWEDRPEVRVISFAWPFDQGVSGTGKPEDSGQETLWPDAENLPLEEWVALLEFIRLVGESHSLDMQNAKFDCHMFRAGCRRWPGVGDDFMELVSWDTQNGNDLVFGFLPSTSLKGPGTATEFLWGAQESDEKHVISEYLKKKKLPKGRWDLMPWDIIAKYADQDARLTTRLKAVQQDWILDDGVPWMDGKQGRMTASEAFQRRMNMTYLLYRMEKRGLPFDVDSALHYSMELKRRAKEFAKDLPFKPATLDMAKHYWFGSGLKQGVEGLGHPPVATTEGGAPSLTANDLGKLIAQDLPGAAVWRNFAKCQDADSRWYEGWVNKAGDDDRLRTSVRQNGTRSGRFSVEGIQLQAIPQNYKLSGYEGMDGIPSPRALIGLAVAGMQGWEMWELDLANAELRVAALFAKCQRMLDMIDQGMDLHGETAKELFNASEDDENWDQRRSIAKRANFSLIFGVGWATLQQNIEVNTGIILSDREAQVLVKDWNALYPEYKRAINVHMAKIEKRQKDRNEVAGYLQMANGERRWFAKHEDTHKGFNQRVQPSLAQFGINWWTLADEYISSQLTPEELEHGGTVLLVHDSMVLLLPSDRAKAIIDRVIEIGVELWAETFPGVPGGVDAKPWNK

SEQ ID NO: 165 - protein, 872 aa, Siphoviridae sp.
MGAHLRSRAHHPRPILPHPSLGPPAVAAPDQSHLQPGSQRVSAAPGRGPCGQRQQSVPDQLGSRRPDPGAVPQPLDPQGRRRDLDGALHPLRHPGRPVRSVAVSRSCSDPRLAQGVRRLLSHGPMLHHRAGRGHYPAYAAAHSRAQAPGRDCVEQPRPVALSVPPAGRGQALLPRDPDQVRAERRADHHPHDHPRQQGPRVRPRGPGQWNVGPHRGNHVARPGLRDPHLLRRGDARQVAAHHRCTRPHAQGTPLMDAFFDLNHFQVIALDTETTGVDWLRDKMFSFAISTPDGRDHYWDIRHTPQALRWLIDQMAAYRGLVVNHHMKFDLHMLRNEGVVIDPRQCECTMIRAALIDEHRMSYALDDVAKDCIGKKKDDRIYHELAAIFGGEPKRAVQISRLSKAPPEIVGRYAKRDTRVALELWEWQNGEIEAQELQQVWALEKRLFPHIFKQERHGIRVDEAAAEQQMQRMTGEIDRVRAEINSIAGFEVNPNPSGSIKKLFEPVKRDGKWFANDGTPLATTDAGAPSLGAAALERMKHPAAAKILDVRKLLRVRDTFLKGHVLGHAHNGRVHPNINQTKGDETGGTGTGRLSYTNPAMQQIPNRDKRLAAMVRPVFLPDEGHAWSYGDLEQHEFRIFCHYTKAPAILAAYKEDPDLDFHTIVAEMTGLPRSAKRSGQANAKQINLGMVFNMGGGLLAAQMGLPYTSEMVKFRGESEEREILRPGEEALEVMERYYAAVPGVKEMAQQASSIAKSRGYVRTIKGRHIRFPGGKFTHKASGLVYQGSSADLNKENVCRICEFLEDEGAGANFLLNIHDEYSISTPLDGVRARMQECKRLIQDRPELRVPIRVDFSMPGSTWWEATQNEIITT

SEQ ID NO: 166 - protein, 765 aa, Microbacterium phage Johann; identical to SEQ ID NO: 118

SEQ ID NO: 167 - protein, 703 aa, Arthrobacter phage Carpal
MRFRTRINQILPSDLLDLYKRGITPGSSMSVDTETSGLRTDEGARISTVSIAWLDPDEEWKFVPNDIWPSGISTNRKEPVHEGQPDITVVSFAWPFDQGVSGTGKPEDHGQATLWPDAENLPLSEWVALLEFIRLVGESHSLDMQNSKFDCHMFRAGCRRWPGIGDDFMELVSWDTQNGNDLVFGFLPSTSLKGPGTATEFLWGAQESDEKHVISEYLKKKKLPKGRWDLMPWDIIAKYADQDARLTTRLKAVQLDWILDGGVPWMDGKQGRLEASEAFQRRMNMTYLLYRMEKRGLPFDIEEAQQASAELKRRAATFGKELPFKPATLDMAKHYWFGAGIKHGVNGLGHPPVATTEGGAPSLTANDLGKLILQDLPGAAEWRNFAKCQDADSRWYEGWLNKAGSDGRLRTSVRQNGTRSGRFSVEGIQLQAIPQNYKLSGYEGMDGIPSPRALIGSAVAKMPGWEMWELDLANAELRVAALFAKCQRMLDMIDQGMDLHGETAKELFNASEDDENWDQRRSIAKRANFSLIFGVGWATLQQNIEVNTGIILSDREAQVLVKDWNALYPEYKRAINEHMARIERRQKDRREVAGYLQMSNGERRWFAKHEDTHKGFNQRVQPSLAQFGINWWTLADKYISSQLTEEELEVGGTVLLVHDSMVLLLPNDRAKAIIDRVIEIGVELWAETFPGVPGGVDAKPWNK

SEQ ID NO: 168 - protein, 697 aa, Arthrobacter phage CallieOMalley
MARVRLLPSDLLGYAKAGLLPGSSMAVDTETSGLRVDEGARISTVSISWLDEDNEWSFVQNEQWPSGISTNRKEPVLEGWPDVRVVSFAWPFDQGVSETGKPGDNGQATLWPDAENLPLTEWLALLDFIEFVGERLSLDMQNMKFDLHQFRAGVRRWPGVGREFEHLVEWDTQNGNDLVFGFLPSTSLKGPGTATEHLWGEQESDEKHVISEYLKKKKLPKGRWDLMPWDVIAKYADQDARLTVRLKHVQQDKILSGGVPWMDGKKGRMDASEAFLRRMNMTRLLYRMEKRGLPFDIEEAELASAELKRRAKEFGKGLPFKPATLDMAKHYWFGSGIKQGVEGLGQPPIATTATGAPSLTANDLGKLILQELPGAAAWRNFAKCQDADSRWYEGWLTKAGGDGRLRTSVRQNGTRSGRFSVEGIQLQAIPQNYKLSGYEGMDGIPSPRALIGSAVAKMPGWEMWELDLANAELRVAALFAKCQRMLDMIDQGMDLHGETAKELFNAAEDDENWDQRRSIAKRANFSLIFGVGWETLQQNIEVNTGIVLSDREAQVLVKDWNALYPEYKRAINAHMARIEQRQKKELGGYLQMSNGERRWFARHEDTHKGFNQRVQPSLAQYGIDWWTISDEFISSQLTEEELEVGGTVLLVHDSMVLLLPSDRAEGIINQVIDLGVGLWSERFPGVPGGVDAKPWNK

SEQ ID NO: 169 - protein, 701 aa, Arthrobacter phage Bodacious
MALKRLLPSDLLGYAKAGLLPGSSMAVDTETSGLRVDQGARISTVSVAWLDPDNEWSLVQTEQWPSGISTNRLEPVYEGKPDIRVISFAWPFDQGVSGTGKPEDNGQATLWPDAENLPLSEWVALLEFIELVGDQLSLDMQNMKFDLHQFRAGVRRWPGVGQDFIDQVEWDTQNGNDLVFGFLPSTSLKGPGTAVEFLWGAEESDEKHIISEYLKKKKLPKGRWDLMPWDIIAKYADQDARLTVRLKHVQQDWILDEGVPWMDGKNGRLEASEAFQRRMNMTRLLYRMEKRGLPFDIEEAQQASAELKRRAATFGKELPFRPATLDMAKHYWFGAGIKHGVNGLGHPPVATTDGGAPSLTANDLGKLILMDLPGAAVWRNFAKCQDADSRWYEGWVTKAGADGRLRTSVRQNGTRSGRFSVEGIQLQAIPQNYKLSGYEGMDGIPSPRALIGSAVAKMPGWEMWELDLANAELRVAALFAKCQRMLDMIDQGMDLHGETAKELFNASEDDENWDQRRSIAKRANFSLIFGVGWATLQQNIEVNTGIILSDREAQVLVKDWNALYPEYKRAINLHMSKIEKRQKDRREVAGYLQMSNGERRWFAKHEDTHKGFNQRVQPSLAQFGINWWTLADKYIESMLTEEELEVGGTVLLVHDSMVLLLPSDRAKVIIDRVIEIGVELWAETFPGVPGGVDAKIWNGGK

SEQ ID NO: 170 - protein, 706 aa, Arthrobacter phage BigMack
MGDIVRGARLLPSDLLALYQMGVNTPGSSMSVDTETSGLRTDEGARISTVSIAWLDETDDWDFVQSEVWPSGISTNHKEPVYEGKPDIRVISFAWPFDQGVSGTGKPEDNGQATLWPDAENLPLSEWTALLEFIRLVGDSHSLDMQNSKFDCHMFRAGCRRWPGVGDDFMDFVQWDTQNGNDLVFGFLPSTSLKGPGTATEFLWGAQESDEKHVISEYLKKKKLPKGRWDLMPWDTIAKYADQDARLTTRLKAVQLDWILDGGVPWMDGKQGRMEASEAFLRRMNMTYLLYRMEKRGLPFDIEEAQQASAELKRRASTFSKELPFKPATLDMAKHYWFGSGLKHGVEGLGHPPVATTDGGAPSLTANDLGKLILQDLPGAAVWRNFAKCQDADSRWYEGWLTKAGRDGRLRTSVRQNGTRSGRFSVEGIQLQAIPQNYKLSGYEGMDGIPSPRALIGSAVAKMPGWEMWELDLANAELRVAALFAKCQRMLDMIDQGMDLHGETAKELFNASEDDENWDQRRSIAKRANFSLIFGVGWATLQQNIEVNTGIILSDREAQVLVKDWNALYPEYKRAINEHMARIERRQKDRREVAGYLQMSNGERRWFAKHEDTHKGFNQRVQPSLAQFGINWWTLADKYISSQLTEEELEVGGTVLLVHDSMVLLLPNDRAKAIIDRVIEIGVELWAETFPGVPGGVDAKIWNGGK

SEQ ID NO: 171 - protein, 703 aa, Arthrobacter phage Beethoven
MRFRTRISQILPSDLLDLYKRGITPGSSMSVDTETSGLRTDEGARISTVSIAWLDPDEEWKFVPNDIWPSGISTNRKEPVHEGQPDITVVSFAWPFDQGVSGTGKPEDHGQATLWPDAENLPLSEWVALLEFIRLVGESHSLDMQNSKFDCHMFRAGCRRWPGIGDDFMELVSWDTQNGNDLVFGFLPSTSLKGPGTATEFLWGAQESDEKHVISEYLKKKKLPKGRWDLMPWDIIAKYADQDARLTTRLKAVQLDWILDGGVPWMDGKQGRLEASEAFQRRMNMTYLLYRMEKRGLPFDIEEAQQASAELKRRAATFGKELPFKPATLDMAKHYWFGAGIKHGVNGLGHPPVATTDGGAPSLTANDLGKLILQDLPGAAVWRNFAKCQDADSRWYEGWLNKAGSDGRLRTSVRQNGTRSGRFSVEGIQLQAIPQNYKLSGYEGMDGIPSPRALIGSAVAKMPGWEMWELDLANAELRVAALFAKCQRMLDMIDQGMDLHGETAKELFNASEDDENWDQRRSIAKRANFSLIFGVGWATLQQNIEVNTGIILSDREAQVLVKDWNALYPEYKRAINLHMSKIEKRQKDRREVAGYLQMSNGERRWFAKHEDTHKGFNQRVQPSLAQFGINWWTLADKYISSQLTEEELEVGGTVLLVHDSMVLLLPNDRAKAIIDRVIEIGVELWAETFPGVPGGVDAKPWNK

SEQ ID NO: 172 - protein, 699 aa, Arthrobacter phage Aledel
MARERLLPSDLLGYAKAGLLPGSSMAVDTETSGLRTDEGARVSTVSVAWLDEDNEWSFVKTEQWDSGISTNRFEQVYPGFPDIRVISFAWPFDQGVSGTGKPEDNGQATLWPDADNLPLSEWLALLEFIEFVGDRMSLDFQNAKFDLHMFRAGVRRWPGVGQDFIEQLQWDTQNGNDLVFGFLPSTSLKGPGTATEYLWGAQESDEKHVISEYLKKKKLPKGRWDLMPWDIIAKYADQDARLTVRLKHVQQDKILCGGVPWMDGKQGRMEASEAFQRRMNMTRLLYRMEKRGLPFHVEQAQHWSAELKKRAADFAQQLPFKPATLDMAKHYWFGEGTKQGVEGLGHPPVSTTEKGAPSLTANDVGKLILQDLPGAGAWRNFAKCQDADVRWYEGWITKAGPDGRLRTSVRQNGTRSGRFSVEGIQLQAIPQNYKLSGYEGMDGIPSPRALIGAGVAEMPGWEMWELDLANAELRVAALFAGCQRMLDMIDQGMDLHGQTAIDLFDASEDDENWDQRRSIAKRANFSLIFGVGWATLQENIEVNTGIVLSDREAQVLVKDWNALYPEYKRAINAHMDRIEKRRKNRKEPAGYLQMSNGERRWFSEFEDTHKGFNQRVQPSLAQYGIDWWSASDEFISSQLTEEELEVGGTVLLVHDSMVLLLPSDRAEAIIEQVIQIGVDLWSTRFAGVPGGVDAKPWNK

SEQ ID NO: 173 - protein, 701 aa, Arthrobacter phage ChewChew; identical to SEQ ID NO: 169

SEQ ID NO: 174 - protein, 699 aa, Arthrobacter phage Eunoia; identical to SEQ ID NO: 172

SEQ ID NO: 175 - protein, 701 aa, Arthrobacter phage CristinaYang; identical to SEQ ID NO: 169

SEQ ID NO: 176 - protein, 702 aa, Arthrobacter phage GreenHearts
MVVMPERVLPSDLLHLMNKHEIFPTSIVAVDTETSGLRTDEGARISTVSVAWADPSGEWDFVQTEQWPSGISTYREEPIYEGWPDCPVVSFAWPFDQGVSGTGKPEDSGQETLWPDAENLPLAEYMALLEFIMIAGEDHGLTMQNMKFDLHQFRAGVRRWPGIGDDFVDLVKWDTQNGNDLIYGYLPSTSLKGPGTATEHLWGAAESDEKHVISAYLTKKKLPKGRWDLMPWDVIAKYADQDARLTVRLALRQEDDIKNGKVSWMDGKQGRMTAQQAMDRRMNMTRLLYAMEKRGLPFDIEEAQIASAELKFRAKQFAKDLPFKPATLDMAKHYWFGTGLKQGVVGLEQPPVATTAGGAPSLTAHDLGKLILQDLPGASVWRNFAKCQDADSRWYEGWVTKAGADGRLRTSVRQNGTRSGRFSVEGIQLQAIPQNYKLSGYEGMDDIPSPRALIGSAVAKMPDWEMWELDLANAELRVAALFAGCQRMLDMIDKGMDLHGETAKELFDASEDDENWDQRRSIAKRANFSLIFGVGWATLQQNIEVNTGIVLSDREAQVLVKDWNGLYPEYKRAINVHMDRIATRQKSKKELGGYLQMSNGERRWFASHEDTHKGFNQRVQPSLAQFGIDWWTLADAYISSQLTPEELEHGGTVLLVHDSMVLLLPKDLAERIIEEVIRIGVELWSRTFVGVPGGVDAKPWNK

SEQ ID NO: 177 - protein, 702 aa, Arthrobacter phage Huckleberry
MEYTGEKLLPSDLLFLYKQAGLTPGSSMSVDTETSGLRTDEGARISTVSVGWLDEDNEWEFVHNEVWPSGISTNRMEEAWEDRPEVRVISFAWPFDQGVSGTGKPEDSGQETLWPDAENLPLEEWVALLEFIRLVGESHSLDMQNAKFDCHMFRAGCRRWPGVGDDFMELVSWDTQNGNDLVFGFLPSTSLKGPGTATEFLWGAQESDEKHVISEYLKKKKLPKGRWDLMPWDIIAKYADQDARLTTRLKAVQQDWILDEGVPWMDGKQGRMTASEAFQRRMNMTYLLYRMEKRGLPFDVDSALHYSMELKRRAKEFAKDLPFKPATLDMAKHYWFGSGLKQGVEGLGHPPVATTEGGAPSLTANDLGKLIAQDLPGAAVWRNFAKCQDADSRWYEGWVNKAGDDDRLRTSVRQNGTRSGRFSVEGIQLQAIPQNYKLSGYEGMDGIPSPRALIGLAVAGMQGWEMWELDLANAELRVAALFAKCQRMLDMIDQGMDLHGETAKELFNASEDDENWDQRRSIAKRANFSLIFGVGWATLQQNIEVNTGIILSDREAQVLVKDWNALYPEYKRAINVHMAKIEKRQKDRNEVAGYLQMANGERRWFAKHEDTHKGFNQRVQPSLAQFGINWWTLADEYISSQLTPEELEHGGTVLLVHDSMVLLLPSDRAKMIIDRVIEIGVELWAETFPGVPGGVDAKPWNK

SEQ ID NO: 178 - protein, 704 aa, Arthrobacter phage Lennox
MGDIVRGARLLPSDLLALYQMGVNTPGSSMSVDTETSGLRTDEGARISTVSIAWLDETDDWEFVRSEVWPSGISTNRKEPVYEGKPDIRVISFAWPFDQGVSGTGKPEDNGQATLWPDAENLPLSEWTALLEFIRLVGDSHSLDMQNSKFDCHMFRAGCRRWPGIGDDFMKFVEWDTQNGSDLVFGFLPSTSLKGPGTAVEFLWGAEESDEKHVISEYLKKKKLPKGRWDLMPWDIIAKYADQDARLTTRLKAVQQDWILDEGVPWMDGKNGRLEASEAFLRRMNMTRLLYRMEKRGLPFDIEEAQQASAELKRRAATFGKELPFKPATLDMAKHYWFGAGIKHGVNGLGHPPVATTDGGAPSLTANDLGKLILQDLPGAAVWRNFAKCQDADSRWYEGWLTKAGADGRLRTSVRQNGTRSGRFSVEGIQLQAIPQNYKLSGYEGMDGIPSPRALIGSAVAKMPGWEMWELDLANAELRVAALFAKCQRMLDMIDQGMDLHGETAKELFNASEDDENWDQRRSIAKRANFSLIFGVGWATLQQNIEVNTGIILSDREAQVLVKDWNALYPEYKRAINLHMSKIEKRQKDRREVAGYLQMSNGERRWFAKHEDTHKGFNQRVQPSLAQFGINWWTLADKYIESMLTEEELEVGGTVLLVHDSMVLLLPSDRAKVIIDRVIEIGVELWSETFPGVPGGVDAKPWNK

SEQ ID NO: 179 - protein, 697 aa, Arthrobacter phage Litotes
MARVRLLPSDLLGYAKAGLLPGSSMAVDTETSGLRVDEGARISTVSISWLDEDNEWSFVQNEQWPSGISTNRKEPVLEGWPDVRVVSFAWPFDQGVSGTGKPEDNGQATLWPDAENLPLTEWLALLDFIEFVGECLSLDMQNMKFDLHQFRAGVRRWPGVGREFEHLVEWDTQNGNDLVFGFLPSTSLKGPGTATEHLWGAQESDEKHVISEYLKKKKLPKGRWDLMPWDVIAKYADQDARLTVRLKHVQQDKILSGGVPWMDGKKGRMDASEAFLRRMNMTRLLYRMEKRGLPFDIEEAELASAELKRRAKEFGKGLPFKPATLDMAKHYWFGSGIKQGVEGLGQPPIATTATGAPSLTANDLGKLILQELPGAAAWRNFAKCQDADSRWYEGWLTKAGGDGRLRTSVRQNGTRSGRFSVEGIQLQAIPQNYKLSGYEGMDGIPSPRALIGSAVAKMPGWEMWELDLANAELRVAALFAKCQRMLDMIDQGMDLHGETAKELFNAAEDDENWDQRRSIAKRANFSLIFGVGWETLQQNIEVNTGIVLSDREAQVLVKDWNALYPEYKRAINAHMARIEQRQKKELGGYLQMSNGERRWFARHEDTHKGFNQRVQPSLAQYGIDWWTISDEFISSQLTEEELEVGGTVLLVHDSMVLLLPSDRAEGIINQVIDLGVGLWSERFPGVPGGVDAKPWNK

SEQ ID NO: 180 - protein, 701 aa, Arthrobacter phage Nancia; identical to SEQ ID NO: 169

SEQ ID NO: 181 - protein, 699 aa, Arthrobacter phage Lasagna
MALKRLLPSDLLGYAKAGLLPGSSMAVDTETSGLRVDQGARISTVSVAWLDPDNEWSLVQTEQWPSGISTNRLEPVYEGKPDIRVISFAWPFDQGVSGTGKPEDNGQATLWPDAENLPLSEWVALLEFIELVGDQLSLDMQNMKFDLHQFRAGVRRWPGVGQDFIDQVEWDTQNGNDLVFGFLPSTSLKGPGTAVEFLWGAEESDEKHIISEYLKKKKLPKGRWDLMPWDIIAKYADQDARLTVRLKHVQQDWILDEGVPWMDGKNGRLEASEAFQRRMNMTRLLYRMEKRGLPFDIEEAQQASAELKRRAATFGKELPFRPATLDMAKHYWFGAGIKHGVNGLGHPPVATTDGGAPSLTANDLGKLILMDLPGAAVWRNFAKCQDADSRWYEGWVTKAGADGRLRTSVRQNGTRSGRFSVEGIQLQAIPQNYKLSGYEGMDGIPSPRALIGSAVAKMPGWEMWELDLANAELRVAALFAKCQRMLDMIDQGMDLHGETAKELFNASEDDENWDQRRSIAKRANFSLIFGVGWATLQQNIEVNTGIILSDREAQVLVKDWNALYPEYKRAINLHMSKIEKRQKDRREVAGYLQMSNGERRWFAKHEDTHKGFNQRVQPSLAQFGINWWTLADKYIESMLTEEELEVGGTVLLVHDSMVLLLPSDRAKVIIDRVIEIGVELWAETFPGVPGGVDAKPWNK

SEQ ID NO: 182 - protein, 699 aa, Arthrobacter phage OMalley; identical to SEQ ID NO: 172

SEQ ID NO: 183 - protein, 699 aa, Arthrobacter phage Riovina; identical to SEQ ID NO: 172

SEQ ID NO: 184 - protein, 703 aa, Arthrobacter phage Riverdale
MRFRTRISQILPSDLLDLYKRGITPGSSMSVDTETSGLRTDEGARISTVSIAWLDPDEEWKFVPNDIWPSGISTNRKEPVHEGQPDITVVSFAWPFDQGVSGTGKPEDHGQATLWPDAENLPLSEWVALLEFIRLVGESHSLDMQNSKFDCHMFRAGCRRWPGIGDDFMELVSWDTQNGNDLVFGFLPSTSLKGPGTATEFLWGAQESDEKHVISEYLKKKKLPKGRWDLMPWDIIAKYADQDARLTTRLKAVQLDWILDGGVPWMDGKQGRLEASEAFQRRMNMTYLLYRMEKRGLPFDIEEAQQASAELKRRAATFGKELPFKPATLDMAKHYWFGAGIKHGVNGLGHPPVATTEGGAPSLTANDLGKLILQDLPGAAVWRNFAKCQDADSRWYEGWLNKAGSDGRLRTSVRQNGTRSGRFSVEGIQLQAIPQNYKLSGYEGMDGIPSPRALIGSAVAKMPGWEMWELDLANAELRVAALFAKCQRMLDMIDQGMDLHGETAKELFNASEDDENWDQRRSIAKRANFSLIFGVGWATLQQNIEVNTGIILSDREAQVLVKDWNALYPEYKRAINLHMSKIEKRQKDRREVAGYLQMSNGERRWFAKHEDTHKGFNQRVQPSLAQFGINWWTLADKYISSQLTEEELEVGGTVLLVHDSMVLLLPNDRAKAIIDRVIEIGVELWAETFPGVPGGVDAKPWNK

SEQ ID NO: 185 - protein, 703 aa, Arthrobacter phage Rozby
MRFRTRISQILPSDLLDLYKRGITPGSSMSVDTETSGLRTDEGARISTVSIAWLDPDEEWKFVPNDIWPSGISTYRKEPVHEGQPDITVVSFAWPFDQGVSGTGKPEDHGQATLWPDAENLPLSEWVALLEFIRLVGESHSLDMQNSKFDCHMFRAGCRRWPGIGDDFMELVSWDTQNGNDLVFGFLPSTSLKGPGTATEFLWGAQESDEKHVISEYLKKKKLPKGRWDLMPWDIIAKYADQDARLTTRLKAVQLDWILDDGVPWMDGKQGRMEASEAFQRRMNMTYLLYRMEKRGLPFDIEEAQQASAELKRRAATFGKELPFKPATLDMAKHYWFGAGIKHGVNGLGHPPVATTEGGAPSLTANDLGKLILQDLPGAAVWRNFAKCQDADSRWYEGWLNKAGSDGRLRTSVRQNGTRSGRFSVEGIQLQAIPQNYKLSGYEGMDGIPSPRALIGSAVAKMPGWEMWELDLANAELRVAALFAKCQRMLDMIDQGMDLHGETAKELFNASEDDENWDQRRSIAKRANFSLIFGVGWATLQQNIEVNTGIILSDREAQVLVKDWNALYPEYKRAINLHMSKIEKRQKDRREVAGYLQMSNGERRWFAKHEDTHKGFNQRVQPSLAQFGINWWTLADKYISSQLTEEELEVGGTVLLVHDSMVLLLPSDRAKAIIDRVIEIGVELWAETFPGVPGGVDAKPWNK

SEQ ID NO: 186 - protein, 699 aa, Arthrobacter phage Pterodactyl
MALKRLLPSDLLGYVKAGLLPGSSMAVDTETSGLRVDQGARISTVSVAWLDPDNEWSLVQTEQWPSGISTNRLEPVYEGKPDIRVISFAWPFDQGVSGTGKPEDNGQATLWPDAENLPLSEWVALLEFIELVGDQLSLDMQNMKFDLHQFRAGVRRWPGVGQDFIDQVEWDTQNGNDLVFGFLPSTSLKGPGTAVEFLWGAEESDEKHVISEYLKKKKLPKGRWDLMPWDIIAKYADQDARLTTRLKAVQQDWILDEGVPWMDGKNGRLEASEAFLRRMNMTRLLYRMEKRGLPFDIEEAQQASAELKRRAATFGKELPFKPATLDMAKHYWFGAGIKHGVNGLGHPPVATTDGGAPSLTANDLGKLILQDLPGAAVWRNFAKCQDADSRWYEGWLTKAGADGRLRTSVRQNGTRSGRFSVEGIQLQAIPQNYKLSGYEGMDGIPSPRALIGSAVAKMPGWEMWELDLANAELRVAALFAKCQRMLDMIDQGMDLHGETAKELFNASEDDENWDQRRSIAKRANFSLIFGVGWATLQQNIEVNTGIILSDREAQVLVKDWNALYPEYKRAINLHMSKIEKRQKDRREVAGYLQMSNGERRWFAKHEDTHKGFNQRVQPSLAQFGINWWTLAEKYIESMLTEEELEVGGTVLLVHDSMVLLLPSDRAKEIIDRVIEIGVQLWSETFPGVPGGVDAKEWNR

SEQ ID NO: 187 - protein, 703 aa, Arthrobacter phage Savage2526; identical to SEQ ID NO: 136

SEQ ID NO: 188 - protein, 703 aa, Arthrobacter phage TattModd
MKFRTRISQILPSDLLDLYKRGVTPGSSMSVDTETSGLRTDEGARISTVSIAWLDPDEEWKFVPNDIWPSGISTNRKEPVHEGQPDITVVSFAWPFDQGVSGTGKPEDHGQATLWPDAENLPLSEWVALLEFIRLVGDSHSLDMQNSKFDCHMFRAGCRRWPGIGDDFMELVSWDTQNGNDLVFGFLPSTSLKGPGTATEFLWGAQESDEKHIISEYLKKKKLPKGRWDLMPWDIIAKYADQDARLTTRLKAVQLDWILDGGVPWMDGKQGRMEASEAFQRRMNMTYLLYRMEKRGLPFDIEEAQQASAELKRRAATFGKELPFKPATLDMAKHYWFGAGIKHGVNGLGHPPVATTEGGAPSLTANDLGKLILQDLPGAAVWRNFAKCQDADSRWYEGWLNKAGSDGRLRTSVRQNGTRSGRFSVEGIQLQAIPQNYKLSGYEGMDGIPSPRALIGSAVAKMPGWEMWELDLANAELRVAALFAKCQRMLDMIDQGMDLHGETAKELFNASEDDENWDQRRSIAKRANFSLIFGVGWATLQQNIEVNTGIILSDREAQVLVKDWNALYPEYKRAINEHMARIEKRQKDRREVAGYLQMSNGERRWFAKHEDTHKGFNQRVQPSLAQFGINWWTLADKYISSQLTEEELGVGGTVLLVHDSMVLLLPNDRAKAIIDRVIEIGVELWAETFPGVPGGVDAKIWNK

SEQ ID NO: 189 - protein, 705 aa, Arthrobacter phage Wawa
MKFRTRISQILPSDLLDLYKRGVTPGSSMSVDTETSGLRTDEGARISTVSIAWLDPDEEWKFVPNDIWPSGISTNRKEPVHEGQPDITVVSFAWPFDQGVSGTGKPEDHGQATLWPDAENLPLSEWVALLEFIRLVGDSHSLDMQNSKFDCHMFRAGCRRWPGIGDDFMELVSWDTQNGNDLVFGFLPSTSLKGPGTATEFLWGAQESDEKHVISEYLKKKKLPKGRWDLMPWDIIAKYADQDARLTTRLKAVQLDWILDGGVPWMDGKQGRMEASEAFQRRMNMTYLLYRMEKRGLPFDIEEAQLASMELKWRAKNFAKDLPFKPATLDMAKHYWFGAGIKHGVNGLGHPPVATTDGGAPSLTANDLGKLILQDLPGAAVWRNFAKCQDADSRWYEGWLNKAGSDGRLRTSVRQNGTRSGRFSVEGIQLQAIPQNYKLSGYEGMDGIPSPRALIGSAVAKMPGWEMWELDLANAELRVAALFAKCQRMLDMIDQGMDLHGETAKELFNASEDDENWDQRRSIAKRANFSLIFGVGWATLQQNIEVNTGIILSDREAQVLVKDWNALYPEYKRAINEHMARIERRQKDRREVAGYLQMSNGERRWFAKHEDTHKGFNQRVQPSLAQFGINWWTLADKYISSQLTEEELEVGGTVLLVHDSMVLLLPNDRAKAIIDRVIEIGVELWAETFPGVPGGVDAKIWNGGK

SEQ ID NO: 190 - protein, 699 aa, Arthrobacter phage Supakev
MARERLLPSDLLGYAKAGLLPGSSMAVDTETSGLRTDEGARVSTVSVAWLDEDNEWSFVKTEQWDSGISTNRFEQVYPGFPDIRVISFAWPFDQGVSGTGKPEDNGQATLWPDADNLPLSEWLALLEFIEFVGDRMSLDFQNAKFDLHMFRAGVRRWPGVGQDFIEQLQWDTQNGNDLVFGFLPSTSLKGPGTATEYLWGAQESDEKHVISEYLKKKKLPKGRWDLMPWDIIAKYADQDARLTVRLKHVQQDKILYGGVPWMDGKQGRMGASEAFQRRMNMTRLLYRMEKRGLPFHVEQAQHWSAELKKRAADFAKQLPFKPATLDMAKHYWFGEGTKQGVEGLGHPPVSTTEKGAPSLTANDVGKLILQDLPGAGAWRNFAKCQDADVRWYEGWITKAGPDGRLRTSVRQNGTRSGRFSVEGIQLQAIPQNYKLSGYEGMDGIPSPRALIGAGVAEMPGWEMWELDLANAELRVAALFAGCQRMLDMIDQGMDLHGQTAIDLFDASEDDENWDQRRSIAKRANFSLIFGVGWATLQENIEVNTGIVLSDREAQVLVKDWNALYPEYKRAINAHMDRIEKRRKNRKEPAGYLQMSNGERRWFSEFEDTHKGFNQRVQPSLAQYGIDWWSASDEFISSQLTEEELEVGGTVLLVHDSMVLLLPSDRAEAIIEQVIQIGVDLWSTRFVGVPGGVDAKPWNK

SEQ ID NO: 191 - protein, 703 aa, Arthrobacter phage Zorro; identical to SEQ ID NO: 149

SEQ ID NO: 192 - protein, 703 aa, Arthrobacter phage Potatoes
MRFRTRINQILPSDLLDLYKRGITPGSSMSVDTETSGLRTDEGARISTVSIAWLDPDEEWKFVPNDIWPSGISTNRKEPVHEGQPDITVVSFAWPFDQGVSGTGKPEDHGQATLWPDAENLPLSEWVALLEFIRLVGESHSLDMQNSKFDCHMFRAGCRRWPGIGDDFMELVSWDTQNGNDLVFGFLPSTSLKGPGTATEFLWGAQESDEKHVISEYLKKKKLPKGRWDLMPWDIIAKYADQDARLTTRLKAVQLDWILDNGVPWMDGKQGRMEASEAFQRRMNMTYLLYRMEKRGLPFDIEEAQQASAELKRRAATFGKELPFKPATLDMAKHYWFGAGIKHGVNGLGHPPVATTDGGAPSLTANDLGKLILQDLPGAAEWRNFAKCQDADSRWYEGWLNKAGSDGRLRTSVRQNGTRSGRFSVEGIQLQAIPQNYKLSGYEGMDGIPSPRALIGSAVAKMPGWEMWELDLANAELRVAALFAKCQRMLDMIDQGMDLHGETAKGLFNASEDDENWDQRRSIAKRANFSLIFGVGWATLQQNIEVNTGIILSDREAQVLVKDWNALYPEYKRAINLHMSKIEKRQKDRREVAGYLQMSNGERRWFAKHEDTHKGFNQRVQPSLAQFGINWWTLADKYISSQLTEEELEVGGTVLLVHDSMVLLLPSDRAKAIIDRVIEIGVELWAETFPGVPGGVDAKPWNK

SEQ ID NO: 193 - protein, 702 aa, Arthrobacter phage HeadNerd
MEYTGEKLLPSDLLFLYKQAGLTPGSSMSVDTETSGLRTDEGARISTVSVGWLDEDNEWEFVHNEVWPSGISTNRMEEVWEDRPEVRVISFAWPFDQGVSGTGKPEDSGQETLWPDAENLPLEEWVALLEFIRLVGESHSLDMQNAKFDCHMFRAGCRRWPGVGDDFMELVSWDTQNGNDLVFGFLPSTSLKGPGTATEFLWGAQESDEKHVISEYLKKKKLPKGRWDLMPWDIIAKYADQDARLTTRLKAVQQDWILDEGVPWMDGKQGRMTASEAFQRRMNMTYLLYRMEKRGLPFDVDSALHYSMELKRRAKEFAKDLPFKPATLDMAKHYWFGSGLKQGVEGLGHPPVATTEGGAPSLTANDLGKLIAQDLPGAAVWRNFAKCQDADSRWYEGWVNKAGDDDRLRTSVRQNGTRSGRFSVEGIQLQAIPQNYKLSGYEGMDGIPSPRALIGLAVAGMQGWEMWELDLANAELRVAALFAKCQRMLDMIDQGMDLHGETAKELFNASEDDENWDQRRSIAKRANFSLIFGVGWATLQQNIEINTGIILSDREAQVLVKDWNALYPEYKRAINVHMAKIEKRQKDRNEVAGYLQMTNGERRWFAKHEDTHKGFNQRVQPSLAQFGINWWTLADEYISSQLSPEELEHGGTVLLVHDSMVLLLPSDRAKMIIDRVIEIGVELWAETFPGVPGGVDAKPWNK

SEQ ID NO: 194 - protein, 703 aa, Arthrobacter phage Cholula; identical to SEQ ID NO: 192

SEQ ID NO: 195 - protein, 703 aa, Arthrobacter phage MrGloopy
MKFRTRISQILPSDLLDLYKRGVTPGSSMSVDTETSGLRTDEGARISTVSIAWLDPDEEWKFVPNDIWPSGISTNRKEPVHEGQPDITVVSFAWPFDQGVSGTGKPEDHGQATLWPDAENLPLSEWVALLEFIRLVGDSHSLDMQNSKFDCHMFRAGCRRWPGIGDDFMELVSWDTQNGNDLVFGFLPSTSLKGPGTATEFLWGAQESDEKHVISEYLKKKKLPKGRWDLMPWDIIAKYADQDARLTTRLKAVQLDWILDGGVPWMDGKQGRMEASEAFQRRMNMTYLLYRMEKRGLPFDIEEAQQASAELKRRAATFGKELPFKPATLDMAKHYWFGAGIKHGVNGLGHPPVATTEGGAPSLTANDLGKLILQDLPGAAVWRNFAKCQDADSRWYEGWLNKAGSDGRLRTSVRQNGTRSGRFSVEGIQLQAIPQNYKLSGYEGMDGIPSPRALIGSAVAKMPGWEMWELDLANAELRVAALFAKCQRMLDMIDQGMDLHGETAKELFNASEDDENWDQRRSIAKRANFSLIFGVGWATLQQNIEVNTGIILSDREAQVLVKDWNALYPEYKRAINEHMARIERRQKDRREVAGYLQMSNGERRWFAKHEDTHKGFNQRVQPSLAQFGINWWTLADKYISSQLTEEELEVGGTVLLVHDSMVLLLPNDRAKAIIDRVIEIGVELWAETFPGVPGGVDAKPWNK

SEQ ID NO: 196 - protein, 703 aa, Arthrobacter phage Scuttle
MRFRTRISQILPSDLLDLYKRGITPGSSMSVDTETSGLRTDEGARISTVSIAWLDPDEEWKFVPNDVWPSGISTYRKEPVHEGQPDITVVSFAWPFDQGVSGTGKPEDHGQATLWPDAENLPLSEWVALLEFIRLVGESHSLDMQNSKFDCHMFRAGCRRWPGIGDDFMELVSWDTQNGNDLVFGFLPSTSLKGPGTATEFLWGAQESDEKHVISEYLKKKKLPKGRWDLMPWDIIAKYADQDARLTTRLKAVQLDWILDGGVPWMDGKQGRMEASEAFQRRMNMTYLLYRMEKRGLPFDIEEAQQASAELKRRAATFGKELPFKPATLDMAKHYWFGAGIKHGVNGLGHPPVATTGGGAPSLTANDLGKLILQDLPGAAVWRNFAKCQDADSRWYEGWLNKAGSDGRLRTSVRQNGTRSGRFSVEGIQLQAIPQNYKLSGYEGMDGIPSPRALIGSAVAKMPGWEMWELDLANAELRVAALFAKCQRMLDMIDQGMDLHGETAKELFNASEDDENWDQRRSIAKRANFSLIFGVGWATLQQNIEVNTGIILSDREAQVLVKDWNALYPEYKRAINLHMSKIEKRQKDRREVAGYLQMSNGERRWFAKHEDTHKGFNQRVQPSLAQFGINWWTLADKYISSQLTEEELEVGGTVLLVHDSMVLLLPSDRAKAIIDRVIEIGVELWAETFPGVPGGVDAKPWNK

SEQ ID NO: 197 - protein, 763 aa, Microbacterium phage Sucha
MGQNPISPTDLNLLWATHPSLQPRHPVALDTETSGLWVDAGARVSTVSVAWQVDDDQLAHWYKLLGGGEQYLWDTGIWTLRKEMTAGARTNAWAKGTWVQEHWILSFAWPFDQGYNGTGKLEDKTDELLAHGKGGLLGQLDWTPDLPEAHPNLSFVEWTSLVQWLWRVGQAVHLTMHNAKFDIHQMKAGTRWTRPDDDIDLLELVDWDTQGGNDLWVAWRTASYGKPTTSLKPTSQWIWGESEGDEKSVISKYLKKYKLPPGRWDLMPWPVIAKYADQDARLTCRLRIWQEAEQARIKGAQGLDGPEKGWDSGWKPEAFERRMETMRMLTRVERRGVPFAPEVANQAIRDLEVRIAAVEEVLSEKLGGVVTLPMAKHYWFGRGDKSGEDGKQVRGLGLEPYALTDGGAPVVDIAVMAKMHRDGVPLVEEWRAYKKLTDAKSRWYEGWGNRVGADNRLRPGFRQNGTASARFSMEEIQLQAIPADYKVKGILDGIPSPRDLIGEGVPDGYGLWEMDLAQAELRVAAKFAKCQKMLDAIDRGADLHGETARELFKVTPDDPRWGEFRQVAKRGNFSLIFGVGWETFQATLWKEAEIDWTEAQCREFIRAWNALYPEYRRAIDLHESAVMQRYHKYGVGWIHDQATKERRHFTKWDVEFFDQKRKELRYGAHKAFNQRVQPALAHYGIDRWLGEEDYLLNRYRGTKHEEVGAGLVLMVHDSSVLLLPHEDAEEVTADLRRMGRDLWAERFPGLPGDLDVSAWAGHA

SEQ ID NO: 198 - protein, 704 aa, Arthrobacter phage EstebanJulior
MGTNWVSKQLLPSDLLELYKHGGLTPGSSMSVDTETSGLRTDEGARISTVSVGWLDEEDEWDFVHNEVWPSGISTNRKEKVWEERPEVRVISFAWPFDQGVSGTGKREDSGQETLWPDAENLPLDEWLALLEFIRLVGESHSLDMQNAKFDCHMFRAGCRRWPGVGDDFMELVSWDTQNGNDLVFGFLPSTSLKGPGTATEFLWGAQESDEKHVISEYLKKKKLPKGRWDLMPWDIIAKYADQDARLTTRLKAVQQDWILDEGVPWMDGKQGRMTASEAFLRRMRMTHLLYRMEKRGLPFDVASAKGYSIELKRRAKELAKDLPFKPATLDMAKHYWFGTGLKQGVEGLGHPPVATTEGGAPSLTANDLGKLIAQDLPGAAVWRNFAKCQDADSRWYEGWVNKAGDDDRLRTSVRQNGTRSGRFSVEGIQLQAIPQNYKLSGYEGMDGIPSPRALIGSAVAMMQGWEMWELDLANAELRVAALFAKCQRMLDMIDQGMDLHGETAKELFNASEDDENWDQRRSIAKRANFSLIFGVGWATLQQNIEVNTGIILSDREAQVLVKDWNALYPEYKRAINLHMAKIEKRQKDRREVAGYLQMANGERRWFAKHEDTHKGFNQRVQPSLAQFGINWWTLADEYISSRLTAEELEHGGTVLLVHDSMVLLLPSDRAKEIIDRVIEIGVDLWAETFPGVPGGVDAKPWNK

SEQ ID NO: 199 - protein, 704 aa, Arthrobacter phage DreamTeam
MGDIVRGARLLPSDLLALYQMGVNTPGSSMAVDTETSGLRTDEGARISTVSIAWLDPTDDWEFVQSEVWPSGISTNRKEPVYEGKPDIRVISFAWPFDQGVSGTGKPEDNGQATLWPDAENLPLSEWTALLEFIRLVGESHSLDMQNSKFDCHQFRAGVRRWPGVVEDFMQYVEWDTQNGNDLVFGFLPSTSLKGPGTAVEFLWGAEESDEKHVISEYLKKKKLPKGRWDLMPWDIIAKYADQDARLTVRLKHVQQDWILDEGVPWMDGKNGRLEASEAFQRRMNMTRLLFRMEKRGLPFDIEEAQSASTELKRRAASFGKDLPFRPATLDMAKHYWFGAGIKQGVNGLGHPPVATTAGGAPSLTANDLGKLILQDLPGAAVWRNFAKCQDADSRWYEGWITKAGADGRLRTSVRQNGTRSGRFSVEGIQLQAIPQNYKLSGYEGMDGIPSPRALIGSAVAKMPGWEMWELDLANAELRVAALFAKCKRMLEMIESGMDLHGETAKELFNASEDDENWDQRRSIAKRANFSLIFGVGWATLQQNIEVNTGIILSDREAQVLVKDWNALYPEYKRAINLHMSKIEKRQKDRREVAGYLQMSNGERRWFAKHEDTHKGFNQRVQPSLAQYGINWWTLADEFISSQLTPDELEVGGTVLLVHDSMVLLLPSDRAKAIIDRVIEIGVELWGKTFPGVPGGVDAKPWNK

SEQ ID NO: 200 - protein, 765 aa, Microbacterium phage Zanella
MGSQQKQITPHQLLELWDTRPGLRPRHPVALDTETSGLWVDAGARVSTVSIAWRVDEDQLREWALVLGGGEQYLWDTGIWTLRKEITAGARSNTWTKGGWTQEHWILSFAWPFDQGTVGTGKNEDPTDRIVEAGLGGMLADLAGVWTPDLPEAHPNLPEREWDDLLTWLKLVGQSVHITMHNAKFDIHLMLAGTRVYFGFIDLMEYVDWDTQGGNDLWIAWRTADFGKPTTSLKPTAQWLWGESEGDEKAVISKYLKKMKLPPGRWDLMPWPIIAKYADQDARLTARLRIWQEAEQARIKGSQGLDGPEKGWDAGWRPEAFERRMETMRMLVRVERRGVPFAPQVAVQAIEDLEARIAEVEAVLAEALGGKVTLPMAKHYWFGSGDVSGEGGKQVRGLGLEPYAVTDTGAPVVDIAVMSKMIRDGVPLVEEWRAYKKLTDAKSRWYEGWGNRVGADNRLRPGFRQNGTASARFSMEEIQLQAIPADYKVKGILAGIPSPRDLIGEGVPEGYGLWEMDLAQAELRVAANFAKCYRMLELIEAGADLHGETAKELFGTSPDDPSWGSDRQVAKRGNFSLIFGVGAATFQATLWKEAEVDMPIDQVKDLIYAWNALYPEYRKAIDYHESTVMARYHKYGVGWIHDQATKERRHFTKWDVEFFDQHRQELRLGAHKAFNQRVQPALAHYGIDRWLAEDRYLEQKYRGTEHERVGAGLVLMVHDSSVLLLPNEDAEQVTADLREMGRKLWAERFPGLPGDLDISAWAGHA

SEQ ID NO: 201 - protein, 699 aa, Arthrobacter phage Maria1952; identical to SEQ ID NO: 152

SEQ ID NO: 202 - protein, 699 aa, Arthrobacter phage LilStuart; identical to SEQ ID NO: 181

SEQ ID NO: 203 - protein, 699 aa, Arthrobacter phage AppleCider
MARVRLLPSDLLGYAKAGLLPGSSMAVDTETSGLRVDEGARISTVSISWLDEDNEWSFVQNEQWPSGISTNRKEPVLEGWPDVRVVSFAWPFDQGVSGTGKPEDNGQATLWPDAENLPLTEWLALLDFIEFVGEHLSLDMQNMKFDLHQFRAGVRRWPGVGREFEHLVEWDTQNGNDLVFGFLPSTSLKGPGTATEHLWGAQESDEKHVISEYLKKKKLPKGRWDLMPWDVIAKYADQDARLTVRLKHVQQDKILSGGVPWMDGKKGRMDASEAFLRRMNMTRLLYRMEKRGLPFDIEEAELASAELKRRAKEFGKELPFKPATLDMAKHYWFGSGIKQGVEGLGQPPIATTATGAPSLTANDLGKLILQELPGAAAWRNFAKCQDADSRWYEGWLTKAGGDGRLRTSVRQNGTRSGRFSVEGIQLQAIPQNYKLSGYEGMDGIPSPRALIGSAVAKMPGWEMWELDLANAELRVAALFAKCQRMLDMIDQGMDLHGETAKELFNAAEDDENWDQRRSIAKRANFSLIFGVGWETLQQNIEVNTGIVLSDREAQVLVKDWNALYPEYKRAINAHMARIEQRQKKELGGYLQMSNGERRWFARHEDTHKGFNQRVQPSLAQYGIDWWTISDEFISSQLTEEELEVGGTVLLVHDSMVLLLPSDRAEGIINRVIDLGVGLWSERFPGVPGGVDAKIWNGGK

SEQ ID NO: 204 - protein, 608 aa, Ochrobactrum phage vB_OspP_OH
MAQLIDPELALRIVREDKREIAYDTETSGLEVTDFVCGYVITSWDDSVYVPVRHEAGGNIPDPESFEKELNRAFADRSRFGGRTIGHNLGFDLRSSARHGVILLDPLEDTMINEGLIDDRTIGYGLDDCAKRYGVTPKLGDELYAEIARRFGGVPDRKQMAKFWKLEGDNRFVVDYATGDGVSTLELWRAQQKPLDEYNLRVPWKLECDLLRHVARVHARGIRVNAPYVAEVGGKLTDMIAEKKRVFEAGFNVRSPKEVEALYRANGYTDDMFDRTDSGKVSFTEKWLETNEIGDAILEVRRLEKARDSFITPLAETFNINGRVHAVLNQSKSDEYGVAGARFSCSQPNLQAFPKRNKTVGMLVRPILCADDGYDLYEGDVSQHEPRLFTCYSREPALVEGYSNGTVDIHDVASQLLGLPRDIGKRMAMGMLSMMYPKTLAMHMRWDVQTARIKHRQFLGGFPNIAAFQKKAVTLFRDTGYVKSVLGRIARLSSPKLDYQAVSRIIQNSAGDHLKWMFLMACQFEEAHDGDLQILMTIHDSIIFQAREGRLDLVKELITLLESTAQQPPFNFIVPIPFEVGRGKDWGASSYGPKAGGEEIKDKREWKI

SEQ ID NO: 205 - protein, 626 aa, Podoviridae sp. ctpVR23
MDFPTLHDQPVFAIDTETTGTQYPKDKPFMISISTLEKDYAWDLRQQPEVIQYINDELRYFKGEIAAHYASFDTRMLSTIGIELPLERVRCTVVRACIINEHESTVFPWTRSRPEGYSLDALGSKYLQIRKDERFYDEARDYFGDARMSKDRIMSRIAELPTELVQRYARQDTRVTLELFLWQNEEIERQELHNIIEFEESVFPELVRAEMRGIHVDVDAAAAAQPALTEEINILQRQLNDVAGFDINVNSTPQIRKLFDPKWDATAGVWIANDGTPVETTDKGQPSFKGDIMHNMSHPAASLITSIRSLIKTRDVFLGKHVIEHAWQGVVYPTINQAKGDEGGTGTGRLSYTDPAMQQIPARNKKIASIVKPCFLPPEGMVWVETDLASFEVRVFAHLVAAYNDSLVRAYAKQPSLDFHQWVGDMTGLPRNATYSGQPNAKQLNLSMIFNQGRGATAAKMGMPWEWDQFTDKTGKVIRYQKAGPEAHKIIDLYHSRVQGVKDLADRAKSVAEQREYVRTRVGRKLRFPKGYKSYKASGLLIQATAADVNKRNWIKCGEAMGKNGHLILNTHDSYSMAMDPDWRPVFKRVKEAIEDTTDIKFRVPLILDLDGAGKNWWSAKNGEQK

SEQ ID NO: 206 - protein, 790 aa, Streptomyces phage Galactica
MIPAQHPELKIPEGWNATRVGNDLLPDLPPGWPVAWDTEGSGLAVDGEPFVSAGRPAHPEARISAVSVSFRWPNPDGTPGEIVDFAWPFDQGPVIGKPGYPIKDPVTNIVTFKPIDAADQAKILAQHSKVLGYTVTPEMAMPNLPPDEYGALVMWLDARDNLAAHNSVHDMHQQRVGLRKDAGGFGGPEGLWAWDPDTEPGSLALSIMNDDSPRLHMMEPTNEPLRIGNVRRNIWCTMVVQKQVVDPLQPAALKPTARRLWGEDATQEEEELKAELAKQGVGLTKRYDLLPWCGAVGKYAAADTNLCYRLWEYQQNVGEEGLIPSYWRLVNVEMELRTTLYRMERRGVAYDAKASFEEGERVRKINAEAARRLPFNPSKRLEAARFYFGPRCPNETTKLVGDQDVPLFCPKSCPGCGGKNGLGLEPRDRTPTGQPKLDIEEKRKLMAEGRPFAKEYMAWTKRRDADSKWYTGWAARVGRDGRIRTSFKQCKNDKERAGAAEGGTKSGRLAVGRWQCQAIPHGKLIPEDTKPVRPMIGVVPAGTEVVRYDGRKEVTQVPRFQAEHDLSAGEVRVVTVISGSTKFWDALDAGADMHALNAKALFGIDESHPDFADLRSAAKRGTFGIIYLGGVKAIQTQMEAASGLKMKTADVQAAKDRFWAENPEIKKFSDTAVQRVTRWMGGPGYLKMLDGWRRWYAIDEKTVSAPNQVIQGNLARAMIYWMTAVEREIPGCLLLQIHDSLVTEHDDTPEGHAEAQRVSDIGQRVFQEYFNVRGRVMDFGISPDRWDKKS

SEQ ID NO: 207 - protein, 699 aa, Arthrobacter phage OurGirlNessie
MALKRLLPSDLLGYAKAGLLPGSSMAVDTETSGLRVDQGARISTVSVAWLDPDNEWSLVQTEQWPSGISTNRLEPVYEGKPDIRVISFAWPFDQGVSGTGKPEDNGQATLWPDAENLPLSEWVALLEFIELVGDQLSLDMQNMKFDLHQFRAGVRRWPGVGQDFIDQVEWDTQNGNDLVFGFLPSTSLKGPGTAVEFLWGAEESDEKHIISEYLKKKKLPKGRWDLMPWDIIAKYADQDARLTVRLKHVQQDWILDEGVPWMDGNNGRLEASEAFQRRMNMTRLLYRMEKRGLPFDIEEAQQASAELKRRAATFGKELPFRPATLDMAKHYWFGAGIKHGVNGLGHPPVATTDGGAPSLTANDLGKLILMDLPGAAVWRNFAKCQDADSRWYEGWVTKAGADGRLRTSVRQNGTRSGRFSVEGIQLQAIPQNYKLSGYEGMDGIPSPRALIGSAVAKMPGWEMWELDLANAELRVAALFAKCQRMLDMIDQGMDLHGETAKELFNASEDDENWDQRRSIAKRANFSLIFGVGWATLQQNIEVNTGIILSDREAQVLVKDWNALYPEYKRAINLHMSKIEKRQKDRREVAGYLQMSNGERRWFAKHEDTHKGFNQRVQPSLAQFGINWWTLADKYIESMLTEEELEVGGTVLLVHDSMVLLLPSDRAKEIIDRVIEIGVQLWSETFPGVPGGVDAKPWNK

SEQ ID NO: 208 - protein, 573 aa, Unknown
  IMGVR_UViG_3300005614_000021
MLVTTPQELRGFFAANLNLGCTAFDIETTGILPYAGDSLLGIAFSNGHDSVYFCPFEHPIDREKMRKYDWKKALQVIFDTGSFVGWNSKFDCQFLRKAGIDMSNCAVIDAMLLWHLSNENEMSYALKNVGYTQFGNDATKPERDLEAAIKDISENKRKAADKSLMWKLHPKLVTEYAEQDTLLTYKLYQRAASRLKADGLISLANEVCDYARVVEDMEATGLKVNRRKCTEEAAICEARVEELRQELESMTWTGFNPGSAQQVQKWLGIPSSAKDRLLELNDPRVDLLLEYRGLSKAKSSFYEAFLKRADRNGRVHGTFRIHGTVAGRMSAAEPNLQQLPKKSKEWHRARFFVEASRGYQLISADLSQAELRMAAHYSEDPFLMSAYCEDGLDLHQMVSERLHISRDAAKTLNFGMNYGAGAAKVAYMLKISVPAAQEVLKAHNKLMPGVKKLNYRLVQQAERDGYIRLWTGRMRRFPKNGFKDKAYTAMNNVIQGGVAEIIRVSMMRLSELLPAECRMVCQVHDEILFECKTEKVAETCKLIKKVMEDFNFRVPIVAETKAGRTWGSMVPVG

SEQ ID NO: 209 - protein, 660 aa, Unknown
  IMGVR_UViG_3300031939_000004
MDKTPILGLPEQVWGLVACDTETSGLHPDDGARVAVVSISYYEQGEHGGRGRQITRAFPFDQERWEDKGERPAKMDRKAAGQEQTSLFALGDLFEDPNLDRQAWDELTGWLSRRRLVMHNAKFDLTMLRAGVRSFGDGTGGGGIDLEPALAWDTMLVAKELDPTKLVALKATAQRLWGEDERAEQNALKKVLDGRKRYDLVPWGTMEPYARRDADQTLRLWLHQRSRVYGHESPDGVLRGAEMSPVEVAGLALRHRTLRTLYRIEQRGVPYHAKRSLAEAEKIRAQMAPLREKLRRAWGVEPTVDTAAHWFYDRQGCKPRKIRKGDEWIEERPVDKTEATFWAKTGVPYAVEWGQYRKMQTALSMWYEGYPALNGPDGRLRTEYKQAHVKSGRMAVGRVQLQAVPKMDKGSGIEGVDHPRLMFFDGPGAIDGWAAYNLDLSQAELRVASHLAGCERMNTMLAEGADLHSVTTESVFKTTKDDVGPVEWKRMRDIAKRLTFGSIFWIGAETFQGTLRKQAELEWPLGECKRAVYAWRDTYPEFGDMYYGRMREFEYQRRLRLVSGRYTYLGPRDYARSGWNRIVQGSLAEFVTEWLNDVELQTREWHPAGGLVLTVHDSAVLYLPTEVGDVLVPQLAQRGAEMASAYFGCPMKIDHGRWLE

SEQ ID NO: 210 - protein, 674 aa, Unknown
  IMGVR_UViG_3300025922_000052
LDAGPGKIVSQAVCFDQGQDVLTLLRAVAKKTETIDESQFDIPFGGLPLGPKDLPLRHSKRIRKWLDNSPDESVGVGAALFQAPNLPVAQWGRLLRQLARMRLAAHNAKFDLHMSAGGLRGCEDQPPEQGGGLDLSSSVASDTQLTQFVLDPQNSTGLKPTSVRLGLGKELGLNAGTEDAEQQALKPWKGPQTDPRFDLIPWPVIRVYAALDAALTLLLDEHQQGQLDDEAFQFELRHARREFALMKTLYSMERRGIGYNTVASLAQATKARELMEQVASQLPFKPTYPGAQKYFFGPTEDQDGKPTGNLGHLPYDDKITKPSKSHPQGQPQVDEETIERLAAEGVPHAQQFARFAELQSANSKWFQAWADMTGKDGRLRTNHKQASVVSGRLAVSRAQLQAIPQNYQIPDGLTPVRSLFTAKPGHQLWEVDVSQAEIRIATAVARCQPMLDQFNSGQDSHSAACWLMFRDEFERDGFPTVALASQKDEGHPKWHEYRQVSKRCNLGILYGAGAGTVRGEIAKFTGIDYPLKQVRQWVDDWRRAFPPFVRMLDAASRKATQDGWVRLTNGRVRWFSAYEPTHKAANQIIQGSQAETIKDCLVRVDREFPGTVLLCIHDSIVLELPASEAEAVARKVQDILIEEFERAFAKPWERGGPVVIVPFAADCKPWGEPE

SEQ ID NO: 211 - protein, 606 aa, Unknown
  IMGVR_UViG_3300021168_000151
MFQGIDPQRAIDMVGFSQILVLDTETTGLKIHDTVVGWVITDREASIYVPTRHLGGGNILYPDEFERVLGLAFKDRARRGFRTIGHNLGFDLRMAGKHGVFPEYPLEDTMINEGLICDITNGFGLDDCSQRYGVTPKLGDALYRSIARKFGGMPDRKTMGNFHRMAGDDPDVVDYSTGDGISTLELWQAQQKLLDDHDLRVPWELECRLIHRVARLHRRGMKVDGEYGEALRGPTGIMERKIAEAHASFPLGFNTNSTKDVESLYRRAGYQDSDFTHTKLGAVSFTEGWLKNNEIGERILGVRQLKKARDSFIAPLVETHNVRGRVHPVLNQSKSDNYGALGARFSCSEPNLQAFPKRNKEVGKVVRRLIVADDGFEIQEGDAKQQEPRLFAYFSDDERLLEGYRSGTMDIHDITSAGLGLPRDTAKRMAMGILTGMSAKALAGHMAWPLDQAQTYHSAWLGGQFPAIERFQKRATAVFRSTGYVKSITGRKARLDDPDYAYRAVSRIIQNSGGDLMKTTLLRACEYEEAHPQVQLLMTIHDSLIWQREIGFDTSELVRICENVPNEFKLGVPIPYEVGTGDNWAEASYGKELETTPKMGYHQPAA

SEQ ID NO: 212 - protein, 626 aa, Unknown
  IMGVR_UViG_3300022924_000029
MSVFDLPVVGGDTETTGLVYPRDKAFSVSFAPAQGASLFIDFRTEQHLIPQLQRDIDNSRCLFVFHNAQFDVKMLAAAGIRMPLERVDCTVVRACQINEHEGTVFPWGNRPGSYQLEDLAQKYLGEGKEEPWEELAAIFGGRPTKNGQIENLQFAPRELVRRYQDKDAQLALRLWLWQQKEIERQDLHSIIAFERKVFPTLARTAMRGIRVDESAAEQAIDSLDVVIDEQQDQFEKTVGIRGINVNSAPQVKALFKPVQLPSGIWVSELTGSTLGTAKSGGPSLTADVLTGMGDPIANAIVELRSTIKTRDTFLKGHILGHMVGDRVYPTINQSKGEDGGTSSGRLSYQDPAMQQIPNRNKKIAAIIKPSFLPEHGQKWLSTDMNSFEVRVFAHLVALYNDALQRIYAANPKMDFHQYVADLMGVPRNATRQGEANAKQLNLSMIFNSGNGAIAHKLGLPWEWNEFESKEIDPKTKKRKIVRYRKAGVEMMSIIDMYHRQVPGVKKLAELAKKISEDRGYIKSFTGRRFRCIKGYKSYKQSGLLIQGTSADFNKMMWTGVEEAIDGNGTIILNIHDSWDTSVDDPIAAYKSMQDAASSLPSRVPLLLDLNGVGSNWWEAIKKPDKK

SEQ ID NO: 213 - protein, 627 aa, Unknown
  IMGVR_UViG_3300025645_000753
MGKLFDEIVNSDMIAIDTETTGTYYPRDKAFSVSVSTKWSDTYIDFRSDRTGATDELLSAIARKRPIIAAHNASFDVKMLSSAGYNIQKSLFQCTMVRASLINEHESTVFPWSKQRGGYSLDYLSDKYLGTRKDEDFHVEACEYFGLPDRTAKGRIMERISELPASLVGRYAKKDSRLAYDLWQWQQKEITLQGIQDIVSFEQKLFPVIVESEMRGIHVDKKEAYSAMDKLTVLIDKSQKDLNKIVGHEFNVNSSPQVRDLFQPYQSEQQWYASDGTPLETTGAGKPSFGGLALHNMTHPVAASIVEIRSLIKTRDTFLGSHIIGHEYEGRVYPNINQVKGEDGGTGTGRLSYTDPAMQQIPTRNKTVAQIVKPCFKPPQGKVWLETDLASFEVRVFAHLVAAYNDNLVQAYKENPSLDFHQYVADETGLPRNATFSGEPNAKQLNLSMIFNQGRGATADKMGMPWEWSEFMGKDGKSVRYQKAGKEANKIINKYHDRVQGVHMLAERAKLYAEKQFVIKTAFGRRLRFPHGYKAYKASGILIQATSADINKRNWLVINEALGSDGHLILNTHDSYSMAVPEDWKRYYRIVSEAISDTTDMNFRVPLILDLDGAGYSWHGAKSGELK

SEQ ID NO: 214 - protein, 749 aa, Unknown
  IMGVR_UViG_3300012929_000007
MPEIAIGNPDGTVTMRAWSACELGAWLADNVKPVGGAVSLDTEASGLHVDGMWASDAAKCSPEARVSIVSLAWHEWAKDICPPCYGATVGVPVGGDHEDGCMGDGSYERLERRSVAIPFDQGMIGGKQGRYIKRVTKRTPVLGWQIIPHTAECVFVHRPMEDRHIPPQTCVCAPWNFGVQGWRDLCEFLVSRVDFFNAKYDMWIMLAGLRNGAHAACDPRCVGWQHAKGCLNAGVDLSGQLGRDVMLWESIVDPVQKASLDNVAHKFFGERKDNGIEEGLKANGVGLGKRYDLVAWDIAGKYAAKDADLTCRAVMREDSMRDMGEIDFKDFPIIEREHEKCLTLFRMEQRGVGFDADLCAEQAVKMHAEVATLVGQLPFTANSIAAGKYFFGSPESGGLGIMPIKLTDGGAPSCDAEVVARLTHEQGTAGEVAKLWAHISNMQSVCSKWYDAWPNRAGRDGRLRTNYWQCSVESDRADGYSGGAISGRLSADRVQLQGVPQAWRIPPDVVGIKKLFRARAGHEVWEIDASNAEVRVAAWLSQCHALAAVINSGVNVHDANTKNIFGIDETDPRWTQIRTSMKRGIFGTIYASGVRTLKQQIDADLKADIPERDIRRFQDELNAAYPELKRTAKACERKVDTNIGGPGYVRLVSGRRRVFGWGEKTYKAFNACVQGGVSEMMSVLMLEVDRTYPGILINQVHDSLWLEIPSIVAESIVKDVQAMGKDIFERAFSTNALHITFEFDAKRLV

SEQ ID NO: 215 - protein, 596 aa, Unknown
  IMGVR_UViG_3300026121_000014
MQLSDRIELALALVSTAPVLAFDIETTGLDSDARVCGYAVSDGDKAVYVPVRHASGNVEEPERFERRLDLAFAERGRRRRLTVGFNIAFDLFHSGRYGVWPRAPLEDSQINEVLIYEYHRAYDLGSCLERRGLGGKDDEALIHTLGEQFGGSRTRSVQMKNFWRLPGDGRLAWDYATGDVLGTYRLWAVQQEEIARPDPQGHTLQRVHRLECELIPYLARMRVKGIRVDQAYAERAIASLDGQIEQALQGFPQGFNPGKIVELHEWMSEHDAASPHLTKKLKPSYTSKTLEASDPGRQVLNLRQLLKTKSTFLAPMLGKARIHPELKQMSDGEYGVKFGRFSCVGPNLQAFPKRNKRLAQIVRPVIVPDRGMALYEADFSQQEPRLYAHFAKCVRLLEGYNATPAIDIHSMASTLMGIDRQFAKTLGLSIFNGMTPKTLATRLGVSELEAKRLYNDFFRAFPEIAHFKNDAANVAAQRGYVRTILGRRQHFPQELSTHVAVSRIIQGSAGDHMKVRLLDACKWVEACGAGLIDILMTIHDAVIWQAEGGMGLTELRDILENPGDPLNLSTPMPVEISAGRNWAEASWPDFEMKEAA

SEQ ID NO: 216 - protein, 563 aa, Unknown
  Station56_SUR_ALL_assembly_NODE_158_length_48479_cov_5.641149
MIVTTENFNSTINSLSKRDLLFVDLETTGLEPFLGDKICGIAVLAGEESFYFPFRHIVGENLPLDYLGKLAPYLSDPSKTYVGHNYKFDLKFLHREGVPLPAKILDTLIAAHLLDEDSKNLKLKSLGAKFFGKAAAEAESVLEDKLNLFGYGKGDMYRLPATDVAPYAEQDVILTAKLLKRFEDMLKQENTYELFKEVSEFELLITQMELYGIKLDVDKVKSNLAEATSQINKVGFKIRDMRGYAINPGSPMQVQQWLGINDSTSRTLERLDRDEARAVLQYRAWSKVKNTYYSPFLQRMDKDNCIHPTFRMTGTVSGRLSCSKPNLHAVPRKSKIYKVKDCIIAREGYILSEIDYSQAEIRVGSHYAREQKMLDMIKAGVDIHTATAKEVGIDRFIAKTLNFSIIYGIGATALAENLNISEADARKYLNKYNKQFPGFRKLLNDAQNVAKSRGYITMYSGRRRHFTGYEPPYHKAISYLVQGSASEMLRSSMCRIWNEMDRDVVRMVLTVHDSILFEIKKGYQDEVIPEILRIMNDQPWCSSPIKSDADIGESWGTMKAYQY

SEQ ID NO: 217 - protein, 619 aa, Unknown
  IMGVR_UViG_3300025122_000002
MKPFKNFPYVAIDVETYGLKWWLPDEGIFGIAISYPDGSDHYFDIRRQPNGIQWLREQKPNRIVNHNIKFDLHMLHNLGVNFDPKLCECTMVRANLINEHLEGYSLDRLAKKYLDENKIDDIYPKLAQLYGGAATRNVQIKNLHKANAELVAPYAKKDTRLALRLWEWQEKEIDRQGLRCIVDFEQKLFPCVFDMERKGVCVDEAKAHTAVGKLTLEIDMLKEKLNEKAGFECNPNPSGDIHKLFSPIKNSDDKWEAIDGTILANTPAGKPCINTEALRNMKHPAASLIVKIRKITRCRDTFLKGHILGHSHNGLLHPNINQVKGDQGGTGTGRLSYTQPALQQIPARDKDIASILRPLFVPDEDYIWCCWDYDQFEYRMFSHYVNDPKILDIYRKNPKFDYHQMVADLTGLPRNAPVSGGANAKQLNLSMIYDMGEASICRTLGLPLDPEIYLFTDREGRTVTYQKAGDEAKCIIEKYHTAIPGVRQLYDKVKAVGKSRGYIRSIAGRHMRYPNRYRLSKAKAILCQGSSADCMKQKMIDIFNYFQSEHPDCRMYLSVHDEINLGIPKKHPKLRKIIRTVKNILEDYSSESCPIKLRVPIRTDFGMGYSWAEASGKGA

SEQ ID NO: 218 - protein, 638 aa, Unknown
  IMGVR_UViG_3300025425_000542
MKVDYEIVNPSDLPKIDGRIVVADTETNGVNVMVSKPFMLQLGIDDKVYILRWNSRLVEWIDNELPKAGLIVGHNIKFDLHMFVQGGCDQNTMYGYNVYDTMVAESLINENHPKFALDYLCQKYFDAGKTDGELIDHIVENIMGGTRKRSETSIRKEAMGHLHEAPFEMVAKYGAGDIILTKKLYDYQIKLIEKPHSSLLMFPSKYHNLEFALEREMKVLKALVEIERRGVPANMDHIVEKEKDLISLRDKLSQKCNDVLKWKTTYNPRSSNDNKRAFAELNLLDGLELTKTGNPSFSGKSLKGVNHPLADYLREIATLDKILSSYTSSMQELYNHKTGKIYCSFNQTKGEDGGAATGRFSCRAPNLQQVPKPKKDKGETSYMTSKLIRSAYYAPKGKLWGSVDWSQFENRVFAHYSGDEKLIKSYRDNPDIDYHTLVSEMMDLARVLGLDAKSARGRAKTINLGLSFGMGMGMLADIMGLPWTMEEFTNAENKHVRYKKPGEEAKQLFKIYHETFPTVQPTLDHLQKLVMTRGFLLTLGGRRMNLEKRFSRKAGPYMFQGNAADIMKEKLIEVNDLTRNTECDLLLSVHDEYDVIAPEESINHWTGKIKDIMENVPQLNVPIRADVGIGENWFMASA

SEQ ID NO: 219 - protein, 597 aa, Unknown
  IMGVR_UViG_3300025925_000024
MVNRIDPELALRMVRESPIIAFDTETSGLTVKDAICGYVVTDADNSIYVPVRHEGGGNVPNVEEFERELRVAFQDRTRLGHHTVGHHLGFDLRAALRHGIQITGSCEDTMINESLCNDLTVGYGLDDCAPRWGVQAKKGAEIYQLLASRFGGIPDRKQMGKFWKLEGDNPVVVDYATGDGISTLQLRNAQQKKLDEMELRKVWKLECDLLPYLARMHNRGMLIDLEYAEKVNADIAAAIGEMSKKFTPGFNARSPKEVEALYRANGYTDSMFDRTEKGAVSFTEGWLETNEIGDAILSIRRLEKARDSFVSPLIDTNNVNGRVHPVLHQSKSDDYGVAGARLSCSEPNLQAIPKRRIEIGRIVRRLVIPDPGMLIEEADAKQQEPRLFTHYSEDKALLYGYRTGEFDMHDRANEVLGLNDREKAKRLGMGMLTMMSVKTLSMHMRCKLDEADYLHNRFLREAFPAIKELQDTAIIRYRSRGYIKSILGRRAHCDSPRFAYRGVSRLIQNSGGDHIKTCMLRACQYEDAHPDDIQMLLSIHDSMLWQRRPDFDSSELVKVLEDVATEFELKVPIPFEVGSGTDWARASYGSKLDKFQE

SEQ ID NO: 220 - protein, 618 aa, Unknown
  IMGVR_UViG_3300010231_000012
VSFPRIADYPVIAYDLETTGLTWWQDKIFGVALSTPEQDHYWDVRREPEVIDWLREEMPRVRKVVNHHIKFDWHFSREAGIILPNDRTECTMIRAALIDEHRLTYDLDSVAKDCVGIGKDSSIYQELADLFGGKPTRHAQMPNLPRAPASIVGRYAKQDTRAALRLWMWQQEQIEKQGLERVHELEMQLLPVIVRMEQYGVRVDIGAAERAANALDVKVRQEQRELDRLAGFPVNPNPSGSIHKLFEPREERTADGTKIFVLNDGTIADPSDSGAKASIDADCLRRMKHPAAAKILGLRKMIKARDTFLRGHVLGNHHGGLIHANINQTKSEGDVGTGTGRLSVNAPALQQIPKRDKDMAAIVRAVFVPYQGCRWVCNDWAQMDFRVFSHYVRNAEILEMYNKDPDTDFHSLAAGLTGLPRSARFAGDPNAKQINLGLVFGMGQGKLAQEMGLPFTIEPNGRGGTWVKPGPEAEAVFEKYHANIPGVRDLLKDASAVAKSRGHVCTILGRRIRFPRGMFVYKAGGLIFQGTAADALKVKLVEADQFFESQPDHIREAGARLVLNVHDEFDWMLPEGCDHLKDEVNRILTAFGPEDRISLRVPIRTDQGVGENWHIASA

SEQ ID NO: 221 - protein, 602 aa, Unknown
  IMGVR_UViG_3300020003_000004
MSLEEKFFKILDSTKEPAYDVETNGLDWKTKHVVGYSVSDGVDAVYVPVRHAGGGNISDPDLFELNLNRSVNNHTGRIVGHNIKFDMHFSQNHGINLGNKVADTMVDECLLDENRFSYSLENVCKNYDVQPKFGKRLYEHISRQTGCKPTRNAMGDFHRLSGDDPIAIEYAAGDTITTKQVFEAQKKALYREELDLVCSVERELTYVLQKMERRGIKVDPNRCEQVKKQVDEMYWEAFAKIPVNEDEFGAITPINVRSKNDLKEYFEFCEITDWPMTAPSMSYPNGQPSFNKNFLALSEEGRNILNVRKIATLKSMFLDVLDKFLHENKLHTTFNQTRGETHGTRSGRLSSNYPNMQQVPKRDYILGRIYRSMFVPDNNYIFIEYDYSQAEPRLYTHYSNEPALLKGYTSEPIIDMHAIAAEYMGVSRDVAKNLNLGMLYTMGAKKLALQLGISLQAAYDIYNLWHKTFSRVSDFTKKAETVAQTRGYVKTLLGRRSRFDHPDYCYRAANRIVQGGSADILKYKLVEIDKYLVNNNLEEVCQMILTIHDSVAFLIHKDYKYLVETIRDILVNVQVPPFNLKIPFTVDYKIGDDWSEATYGTD

SEQ ID NO: 222 - protein, 599 aa, Unknown
  IMGVR_UViG_3300002514_000691
  UNSURE 196: X = any amino acid
  UNSURE 205: X = any amino acid
MEVLDRIVDSDNVVLDVETSGLDWKTNYIVGYVITVGPAEMDTYYIPIRHQGGNFLGARSPSKDTLKKIDTHPFEQDLRDALAKKPTHIIGHNLAFDLKFMHRAGVPTPTCTYEDTMINAALINEHRKSYSLENCCIDAKVTAKRGQPLYEYLADKFGGQPSSKQMGVFWKLSGDDPQGTDYAMGDGIATWALWQXQQKDLDDQXLRQIHNIECRCIRTLHRMMVRGVKVDEERLANVTVEIKKRLDKAMEVLPEGINLRSSTQMKKLFDDAGIIDYPQTEKGNPSFAEDWLVTTELGRRVVAARKYGNLLNSFITPMGQHLYNGRIHTEFNQSRSDQYGTVTGRLSSSRPNMQQVPKRNEELGKLFRAVFVPDKGMVWASVDYSQCEPRLLAHYAGCSVLVRGYLSDPVIDAHTAVAEAANIDRTSGKRLNQGLITGMGKDKLIQELGVERIVGEAMYDQYFANMPELKPFQKHAAKVMKRRGYVTSLLGRRARLDFTGGKDMSYKAVNRLLQCGNADIIKNAMVEIDEYLESEGDTVHMLLSVHDAIDFQFKEKDRHIYEHALEIMTDYGPGCGVELLVPMDVDIGEGKNWGEASYG

SEQ ID NO: 223 - protein, 574 aa, Unknown
  IMGVR_UViG_3300030041_000082
MLVSTREAFHEAFFRLEQEGRLLAFDIETTGLNPYGGDSLLGVSFSNGQSSLYYCPFGHPIAREQMSRYDWKKDLQPIFAEGTFIGWNSKFDCQFLRKQGLDLSGCIVIDAMLLWHLADENRFSYGLKEFGAEVDSDAKVFEDTLNAHLMELPESGRGKPDKSLMWKVDPAVTGSYAEQDARLTCLLYQKVLHKLRQDALTSLAGEMCDYARVIEDIEYTGIKVNRRKCEEETAQCEERVEKLRLQIEGLTWPGFNPGSPKQVCQWLGVSSSAKDKLLELNDPNVDLLLEYRGLSKAVSSFYQAFLSRADRNGRVHANFKIHGTVTGRMSCAEPNLQQLPRKSAEWHRARNFVEASRGYKLISADLSQAELRLMAHYSEDPFLMKAYCEEGLDIHQMVADELGIERNAAKTLNFGMCYGAGPARVAYMLKISDPAARDVLRQHNLLMPGVKKLNYALSAQAEMAGYIRLWSGRMRRYPKNVGLKDKAYTAMNNVIQGGVAEIIRVSMQRLSEVLPSSCRMICQVHDEILFECKTERTEEVCLVIRRTMEDFQFRVPIVSETKVGRTWGSLVPTH

SEQ ID NO: 224 - protein, 600 aa, Unknown
  IMGVR_UViG_3300011432_000015
MTDILAVDTEATGLGPKDRAIGISWQITGEAPRYIDLREDGAGEFLNILDCTDEIPLACHNASYDYRMLYNAGIRLPMKRLQDTVIRATLLDEHEYSYSLDNQGEKYLGRKKETGIWDQMAELFGGKPTRSAQIGRLHMAPKALVETYAMPDAELCHDLWQNQERRIEEQGIRKIVDFEQSVMPTIIRSEMRGIRVDEAAANAAVDKLTIEIDRQKARLFELTGCVFNLDSPKQVAALYKPRMIDGVWFTQDGTPLPATPGGDPSFGAESLRRINDALSTGILETRSLVKTRDTFLRGHILRNAINGRVYPSIHQTKGEDGGTGTGRFSYTEPAMQQIPSRNLEVAGVVKPIFLPEEGQVWLDADMHSFEVRVFVHLVNNPALIAKFLENPRLDYHQHVADLTGLPRKAAFSGEPNAKELNLSMIMGCGDGLVAMKMGLPWEWDEFKKGRETFRYRKAGPEARKIIERYHKLVPGVREFAKRARATTAKFGYLETYMGRRLRFPRGISNHKSQALAVQSTAADINKMNWLLIEQALGNDGRLLLNTHDSYGMSVPVDWQPAWGRVQEAVRDGFPWFRVPLILELSGVGGNWWEALHGTQH

SEQ ID NO: 225 - protein, 602 aa, Unknown
  IMGVR_UViG_3300025647_000845
MTPDIHRFDRIAIDTETTGLHFKTDRIFGISMSTPDGKDYYWDIRRDSKIVEWLKAELPRYKGTVVFFNWSFDVKFLRSHGIVVNPDHIDCAMVRAALIDEHLHDYSLDGLAKKYLGARKDNDIYEELAGIFGGRPTRNQQVKNFPDAPVEMMARYAKRDTRLTLDLWDWQQKEINDQDLHMVCKLERDLFPVLLEMEIEGIRVDTFRAEQAQSKLTKEIDKKQKELDGIAGFHVNPNPSKSIFDLFKPEQRDGKWYAIDGTELSTTPAGKPSVDADALRRMQHPAAGIILDIRKMTKARDTFIGGHILSNSIEGVIYPNINQTKGDDGFGTGTGRLSYSAPALQQIPSRDVQTAQIVRPIFLPDKGQEWAYYDLDQHEFRVMAHYVNNESILKAYADNADTDFHQIVADLTGLPRSPRYAGDANAKQINLGLCFGMGQGKLAKEMGLPFTIDHFPDGREFLKPGSDAIRVFDTYHKAIPGVRDMLKRASEVARSRGHVRTLMGRHIRFPGGNFVHKAGGLIFQGTSADLNKLNMINIHNALKGTGARLLLNVHDEYNLSTPDRGVLDEVKRVIQHHPEIRVPIRTDYGVGNNWWSAAHEDA

SEQ ID NO: 226 - protein, 596 aa, Unknown
  IMGVR_UViG_3300026522_000013
MLIDTPDKLNEIKPSLLSCMDPCVDTETTGLSIFGNAERPRDKVIGISIDIGKEAYYFPFRHKQGTNLPMECMEFFRHYLSNPNRTYGGWNYSYDLHMMAFDGVGIAPNFEDGMLAMHLINENETSFKLKELSDKYHIGDGSLQESILEDKVFDECKRLGLECSRSPRAANNVKSMMYVLPPQDVEPYACDDVRLTRGMLDMLRPALQHYGLYDIWKQVNYYSYIVTLMEHRGMHVDSDIMERYRNEAEGNAADALKRLYEKAGFELNPNSPKKVAEFLGVKSTAAEQLQILIDAGGEGAERAKLIHEARGWKSVDSRYYTPYMNLMDENNVLHCSLNLIGTYTGRLSCSNPNLQAVAKATEVFKVKDVFTARPGFTMIQSDYKQAEMRLVTHYTKDPVMKELIESDADLHSATAERLHIPRSAAKRINFSVIYGIGAKKLSENLRVPFETGKEYLDKYHALYPGFKKLMYQCEDFAKQEGYIKMWTGRTRHFNVPQADPHKAMSNLIQGGVAEIVRVAISRLFPAVRDLGGYMLLQVHDSVIFEIPDENLAIALPAIKMIMEDFDFVPHVGVDVEYGKSWGTFKKWHPGDPIATE

SEQ ID NO: 227 - protein, 579 aa, Unknown
  IMGVR_UViG_3300024517_000247
MPTQELIDTPEKYAEAKRYINERDDDLVMDTETNGLDFIKNRMVGTGLLSGERAFYLPFRHAEGRNLPEPLIRDMCSDILRKDRVQVGYHYGFDVKMMRKEGMALPDRFEDAMLRAHVLNENEDSFKMEDIASKYVDPQAGEAEERLVDMLQGRFGGARSTAKSNLWRLSGAETLEYGTQDLITTRELRDFQASHLESWELSGIAVEVEDFQRTIAEVEIGGCHIDRHRLATSGDYAARKEKQLEGEIQALAGYKLNPRSPKQLKAWLGSTNTKRETLEALADSDPRAQMVLDYRAWQKVDGTYYRPIAMHLDPDGRVHPNLRVTGTVAGRLSCQTIALQGIPRAAADTESPYYGVKRLFAAPEGMSLIELDLAQAEIVLMAHYSRDPKLLEILAKGLSMHDVVAAEQGVPRPVAKALNFSAQYGIGADAFAANYGYSRRESEAYLQGYHQLFGGVQSFMSQCTRIARARGYVRTWTGRARHFNSPRAKLHSAGNNVIQGGIACAMRRAMPEIHRLVPELRQCLSVHDSVLGYAPTAQAEEIARAAAHIMAEQFDGWCSTEMRVDIKMGRNWADATPLA

SEQ ID NO: 228 - protein, 615 aa, Unknown
  IMGVR_UViG_3300025862_000001
MEQKYDWEGLAAADVVAVDCESNGLFPDDGARVSCVACAWEGGSLALPFDQGDRDKEEKQTGQFTFEDTEEDPNLDEHEWKQLLWLLRSKRLVFHNAGFDLIMLAAGTRHWKGADLGDMLHWDTMIAHRILRPNSSAGLDNAARELGVGGKQGLDEVKDWLRTAKKPKGRYDLAPWHVIEPYVRGDAETTLALYEEQVRHFKEDPAIERERRLRECRREFDLAVVLMRMEQRGLGYDAERSLLAAEEMEQKCADIVARLPFKLTPAGARGYFLEQGLTVDRTTPKGAPSIDKEQIRDWAEEGAQWAAEYRDATKAKRAASMWYRGYAEKLGEDGRLRCRYRQTKQRDDGGDSGSRAGRLSAERVNLQAMPKGDKIEEGMVGVRELLLAKKGCSLISLDMSQAELRCAAKYSECEKMLTMLNEGVDFHGKATEDVMHVGRDHPEWKLKRDIGKKLTFGAIFGIGGESFQALLTRETDLQLEVAECDRLVADWRRTYPEIMAAYRRAERVFRERGYVRILPGTEYESKSYLADGDWPHTGWNRMVQGSLAAWLRLWLVEIEREVPGALVLTVHDSVVLELPKRTAKKTAQKVADKAAERASALFDTPMTVDLEVYVK

SEQ ID NO: 229 - protein, 599 aa, Unknown
  IMGVR_UViG_3300027533_000077
MPDILAVDTESTGLSADSRAIGVSWQVTGQEARYIDLREDGAGEFLNILDRTGDIPVVCHNASYDYRMTHNAGIYMPLERMQDTVIRATLLNEHEISYSLDNQGEKYLGRKKESEIWTKLAELFGGKPTRSAQAGRIHLAPKEVVTPYAIPDAELCHDLWQDQQRRIEEQGIERIVDFEASVMPTIIRSEMRGIRVDEEAAHIAVDKLTTQIDAHKNKLFEHAGCVFNIDSPLQVRALYKPRQIDGVWFTQYGTPLPSTPGGEPSFSADALRRINDSLSLGILETRSLQKTRDTFLRGHILSNAINGRVYPSIHQTKGEDGGTGTGRFSYTEPAMQQIPSRNEEVACIVKPIFLPEEGQIWLDGDMHSFEVRVFAHLVKNAKLLDAFAEDPMLDFHQYVADMTGLPRKAHYAGQPNAKELNLSIIMGCGDGLVAMKLGLPWQWAEFKKGKSVFRYRESGPEAKELIDKYHNMLPGVRGFARRCRATTDKFGYIETYMGRRLRFPNGMSNHKAQAVVVQATAADINKRNWQLIEQALGSEGRLLLNTHDSYGMSVPEDWEPIWARIQEAIRDSYPWFRVPLILELSGTGKNWWEAIHHGT

SEQ ID NO: 230 - protein, 605 aa, Unknown
  IMGVR_UViG_3300024265_000430
MARHLIGSIRDYDEAMRHIEGSQLRVADTETTGLIHHRDYIVGASVWARGESFYFPFRHFEGYNIPGADSRLFDLGELLHNPCMANGEPTSLGGFNYQYDVKMWARDGVRKPVLWEDPILMAHLCNENEVSFKMESLAEKYVNESAGGDEQELLDAIRAKFPSAPKKGIKGLMCYLSGAAVGSYAMQDVETAFDLYMFYIPWLKRQGLWELYKEQRYFAKHVTNMELNGLLLDKERLEVNSVGAVAETARLKKILCDMAGHEVNPNSPKQMQALLRVPSTARDKLEIAYEVANPKIKGAKELLSWRRYKKAEGTYYQPFRELVSVEGRVHPNLRIVGGWQQEGSGGGTVAGRLSAQHPNLQAVTRGTGEKYSSRDVFIASPGYTLLEFDFSQAELRVASHYAKEKTMIEMFRAGIDIHQGVADELGFPRSLAKNVNFSFLYGIGPKAFGEKYFMSFKDARDTLRAYDARFPGFKRLYRKCEAFARKHRYIQMWTGRRRHFNTSRTQPRDAMNNLIQGAVGEMIRRLLVAIGEDIKFFDPELYRACLTVHDSGMAEIIAKLEYIYSRMRRIKQLAEDQPWCSVPIKLDFKKGNRWGSMKEIVLTDV

SEQ ID NO: 231 - protein, 613 aa, Unknown
  IMGVR_UViG_3300019487_000044
MNNLNSEAEGFLNLLASDQILGYDVETNGLNWKTGFVCGYGISDGYHSFYVPVRHDGGGNIANVEDFEKLSSNIIKNRTKPLVGHNIKFDMHFSENHGIKLGNKVIDTMVRAALINENRRSFTLQNVCKEFPDIQQKKGKELYEHIASIFNVEPTSNSMGMYYKLPGNDVVAVDYAKMDNVAVKQLYDAQSKELYVQELEVVNNLEANLTYVIQKMERKGIRVDLDQLEVLKNEVHQLRLEAYAQIPLQENLIPININSSKDLQTYFEYCNIEDWPLTEKGNPSFNALYLKTHTEGELILQARKLDTFQNMFLTPINNHIYNGRVHTRFNQAIGEFGGAKPGRLSSADPNMQQIPKRDETIGRKFRQIFLADEDFYLIEFDYSQAEPRLFTHYSKEPILIKGYNSIPYVDMHSIAAELMGLNNKYGYDTEGLEKARNISKNLNLGIMYTMGAEKLANQLGISYSEAKSMISYYYKQFPNISSFTRAASNRAEARGYVKTILGRRARFPYGYYYRAANRIVQGGSADILKKAMVRINNWIEQNGYDDVCQMLLTTHDSLLIQFHKDYLYIIDDIVRIMEDVNTAPFNLIVPFKVNYKSAANNWGDATYGIKKAA

SEQ ID NO: 232 - protein, 708 aa, Unknown
  IMGVR_UViG_3300009776_000099
VSWPAPGEAGTVKHIEDPFRLHPPEAVASVVAFDSETSDLHPDSGAFIGATSVAYRLHDGTLVRGAFPYSQGGWARKGFTPRRLVRGDIRGGMTEAQLAQWAPERSMTDVQKAIFRAWMLDVARVRGLVGHNAQFDVRHFRHIDLELEPFIIWDSMLGQAELDPLEMKGLKETASRIWGAEEADDAAELKDALGLQKAAFGLDKGQGPRYDLVPWSIIGKYAAQDAELTLRLTELQVARLLDGEGSMSAVNRAVRLNRVLMRMERRGFGPYDVETSRAWGERIQARVEQLSASFPDELQPPTPARMSAFYFDQLGLAPWKPGEKPRGYVLKKAGQAGRPRFLRGTAGDREILAANIADYDPTADDKLVMQQGDLSEPVARRLGEEGAPYAADYAEMIRLKTANQMFYANYAKLAGKDGRLRAELRQAQVKTGRLSSSRFNALALPKRVGLTFHDPVTGEEVKPPEPRSLFLPRPGVTRMNLDLSQAELRVGSETARCETMASALREGRDLHGITTSEVFGLDPADGADDRQGTAAYREWKAKRDIAKRLNFGLLFGMGYKTFQAQLWTSAGIEQSSADCKAWCAAWHKLYPEISEANARTEDWVSKRGFVTLWDGTRSYFGRYDYPRTGYNRLVQGGLAAWVGRWLVMVENMTSEWDAFLLAVHDSAVLDLPEDRALEISMHIKRESEAFWLNSFGFPGKVDVEKWAK

SEQ ID NO: 233 - protein, 611 aa, Unknown
  IMGVR_UViG_3300025905_000003
MPDIEKFFRILNETREPAYDVETSGLDWKRCFVCGYSVSDGSDAEYIPVRHAGGGNISCIEEFERTLGRDIARHPGKIVGHNIKFDMHFSENHGIKLGDKVKCTMAREAIIDENRRSYSLENVCKSYDGVTPKLGKDLYIHIANQFGCAPTRDSMGLFYRLRGDDPVAVDYGAGDTLSTSQLAMAQEKKIYEQRLDIVTDMEHHLTYVLQKMERRGVRVDPERLVQVNNEVGEMYYKALSQIKVEIDEYGVEKGINVRSGKDLKEYFESCEIDDWPMTAPSQRFPNGQPSFNKDFLSSTAEGLAILNVRKLAHLKSSFLEVLDDYIYKDKIHTTFNQTRGETHGTRSGRLSSSWPNMQQVPKRDKQLGRIYRRLFVPDRDFFYIEYDYSQAEPRLFTHYSQEPAFLEGYRKTPFIDMYDIIGSYIHQPRDRCKTIGLGIMYMMGAGKLALQLGISYDDALDILKDLSARFPKMLGRDYNNPGFTEKAAQVAQNRSYVKTILGRRSRFDNPRFAYRAANRIVQGGSADILKYKIVQIDNYLKQNNLEEVCHMLLNIHDAVVFQIHKDYEHLVPILASMFEDVNGPPFNLSVPFVMDYKKGSDWSEATYGTGA

SEQ ID NO: 234 - protein, 928 aa, Escherichia coli
  DNA polymerase I
MVQIPQNPLILVDGSSYLYRAYHAFPPLTNSAGEPTGAMYGVLNMLRSLIMQYKPTHAAVVFDAKGKTFRDELFEHYKSHRPPMPDDLRAQIEPLHAMVKAMGLPLLAVSGVEADDVIGTLAREAEKAGRPVLISTGDKDMAQLVTPNITLINTMTNTILGPEEVVNKYGVPPELIIDFLALMGDSSDNIPGVPGVGEKTAQALLQGLGGLDTLYAEPEKIAGLSFRGAKTMAAKLEQNKEVAYLSYQLATIKTDVELELTCEQLEVQQPAAEELLGLFKKYEFKRWTADVEAGKWLQAKGAKPAAKPQETSVADEAAEVTATVISYDNYVTILDEETLKAWIAKLEKAPVFAFDTETDSLDNISANLVGLSFAIEPGVAAYIPVAHDYLDAPDQISRERALELLKPLLEDEKALKVGQNLKYDRGILANYGIELRGIAFDTMLESYILNSVAGRHDMDSLAERWLKHKTITFEEIAGKGKNQLTFNQIALEEAGRYAAEDADVTLQLHLKMWPDLQKHKGPLNVFENIEMPLVPVLSRIERNGVKIDPKVLHNHSEELTLRLAELEKKAHEIAGEEFNLSSTKQLQTILFEKQGIKPLKKTPGGAPSTSEEVLEELALDYPLPKVILEYRGLAKLKSTYTDKLPLMINPKTGRVHTSYHQAVTATGRLSSTDPNLQNIPVRNEEGRRIRQAFIAPEDYVIVSADYSQIELRIMAHLSRDKGLLTAFAEGKDIHRATAAEVFGLPLETVTSEQRRSAKAINFGLIYGMSAFGLARQLNIPRKEAQKYMDLYFERYPGVLEYMERTRAQAKEQGYVETLDGRRLYLPDIKSSNGARRAAAERAAINAPMQGTAADIIKRAMIAVDAWLQAEQPRVRMIMQVHDELVFEVHKDDVDAVAKQIHQLMENCTRLDVPLLVEVGSGENWEQAH

SEQ ID NO: 235 - DNA, 38 bp, Artificial Sequence
  Primer
ccgcggcccgatcgccgcgcggccgcaagcttcctagg

SEQ ID NO: 236 - DNA, 36 bp, Artificial Sequence
  primer
gggttaattaatgaagctagattgggaaagaacagg

SEQ ID NO: 237 - DNA, 48 bp, Artificial Sequence
  primer
gggtctatgcggccgcttaatgtacatcgattaatccttttgcttcgg

SEQ ID NO: 238 - DNA, 30 bp, Artificial Sequence
  primer
gggttattaatggcgcgagtgcgcctactg

SEQ ID NO: 239 - DNA, 36 bp, Artificial Sequence
  primer
gggtctatgcggccgcttaccggttccattccttcg

SEQ ID NO: 240 - DNA, 32 bp, Artificial Sequence
  primer
gtcataacgcgtcatttgcgtacagaatgtcg

SEQ ID NO: 241 - DNA, 32 bp, Artificial Sequence
  primer
cgacattctgtacgcaaatgacgcgttatgac

SEQ ID NO: 242 - DNA, 33 bp, Artificial Sequence
  primer
catgaagttcgcgctgcaccagttccgcgctgg

SEQ ID NO: 243 - DNA, 34 bp, Artificial Sequence
  primer
ctggtgcagcgcgaacttcatgttctgcatgtcc

SEQ ID NO: 244 - DNA, 35 bp, Artificial Sequence
  primer
tcaagtttgcgattcatatgctccgtgcaacaggg

SEQ ID NO: 245 - DNA, 32 bp, Artificial Sequence
  primer
atatgaatcgcaaacttgatgttgtgattaac

SEQ ID NO: 246 - DNA, 32 bp, Artificial Sequence
  primer
gtggctttcgcgctgcaacttgttaacggcgg

SEQ ID NO: 247 - DNA, 37 bp, Artificial Sequence
  primer
gttgcagcgcgaaagccacgttgtggccacataaccc

SEQ ID NO: 248 - DNA, 33 bp, Artificial Sequence
  primer
ggcaaaacctgaaatacgcgcgcggtattctgg

SEQ ID NO: 249 - DNA, 33 bp, Artificial Sequence
  primer
ccagaataccgcgcgcgtatttcaggttttgcc

SEQ ID NO: 250 - DNA, 20 bp, Artificial Sequence
  primer
ccccttattagcgtttgccc

SEQ ID NO: 251 - DNA, 70 bp, Artificial Sequence
  primer
tgccaacgcgggacgtggccagcccgtagaatgttttgtatttgcatcatttcattttctcccgcgatat

SEQ ID NO: 252 - DNA, 20 bp, Artificial Sequence
  primer
atatcgcgggagaaaatgaa

SEQ ID NO: 253 - DNA, 70 bp, Artificial Sequence
  primer
cgggtcacatcttgtgcccgaaggatgtcacggatgtttagtttgtccatggttcaatctcgctccaagg

SEQ ID NO: 254 - DNA, 20 bp, Artificial Sequence
  primer
ccttggagcgagattgaacc

SEQ ID NO: 255 - DNA, 70 bp, Artificial Sequence
  primer
gaggccggtgcctggtccaccgggcgtgcgaagtacaggtagggggtcacttcgcggcctgccccaacag

SEQ ID NO: 256 - DNA, 20 bp, Artificial Sequence
  primer
ctgttggggcaggccgcgaa

SEQ ID NO: 257 - DNA, 70 bp, Artificial Sequence
  primer
tgtccgcctgagaagtcgatcgggtaggcgaggtatagcgtcttggtcacagcttgaccggtcctttcgt

SEQ ID NO: 258 - DNA, 20 bp, Artificial Sequence
  primer
acgaaaggaccggtcaagct

SEQ ID NO: 259 - DNA, 70 bp, Artificial Sequence
  primer
tccttcccaacgcgcgggtccagaatcttaacgtcgatttttttcatcataacgggtcacgatctcgtcg

SEQ ID NO: 260 - DNA, 20 bp, Artificial Sequence
  primer
cgacgagatcgtgacccgtt

SEQ ID NO: 261 - DNA, 16 bp, Artificial Sequence
  primer
ggtattagcgcgctcg

SEQ ID NO: 262 - DNA, 30 bp, Artificial Sequence
  primer
gcgttgttccggaagtcgagcgcgctaata

SEQ ID NO: 263 - DNA, 44 bp, Artificial Sequence
  primer
ccccttattagcgtttgccaaaaaaaaaaaaaaaaaaaaaaaaa

SEQ ID NO: 264 - DNA, 42 bp, Artificial Sequence
  primer
ttttttttttttttttttttttttgggcaaacgctaataagg

SEQ ID NO: 265 - DNA, 70 bp, Artificial Sequence; identical to SEQ ID NO: 253
  primer

SEQ ID NO: 266 - DNA, 20 bp, Artificial Sequence
  primer
ccttggagcgagattgaacc

SEQ ID NO: 267 - DNA, 70 bp, Artificial Sequence
  primer
  variation 7: /note="n = 2-amino-2'-deoxyadenosine"
  variation 9: /note="n = 2-amino-2'-deoxyadenosine"
  variation 21: /note="n = 2-amino-2'-deoxyadenosine"
  variation 22: /note="n = 2-amino-2'-deoxyadenosine"
  variation 25: /note="n = 2-amino-2'-deoxyadenosine"
  variation 30: /note="n = 2-amino-2'-deoxyadenosine"
  variation 34: /note="n = 2-amino-2'-deoxyadenosine"
  variation 40: /note="n = 2-amino-2'-deoxyadenosine"
  variation 49: /note="n = 2-amino-2'-deoxyadenosine"
  variation 56: /note="n = 2-amino-2'-deoxyadenosine"
  variation 57: /note="n = 2-amino-2'-deoxyadenosine"
  variation 67: /note="n = 2-amino-2'-deoxyadenosine"
  variation 68: /note="n = 2-amino-2'-deoxyadenosine"
cgggtcncntcttgtgcccgnnggntgtcncggntgtttngtttgtccntggttcnntctcgctccnngg

SEQ ID NO: 268 - DNA, 20 bp, Artificial Sequence
  primer
  variation 7: /note="n = 2-amino-2'-deoxyadenosine"
  variation 11: /note="n = 2-amino-2'-deoxyadenosine"
  variation 13: /note="n = 2-amino-2'-deoxyadenosine"
  variation 17: /note="n = 2-amino-2'-deoxyadenosine"
  variation 18: /note="n = 2-amino-2'-deoxyadenosine"
ccttggngcgngnttgnncc

SEQ ID NO: 269 - DNA, 42 bp, Artificial Sequence
  primer
ccccccccccccccccccccccccgggcaaacgctaataagg

1. A method for the production of a DNA molecule comprising 2-amino-2′-deoxyadenosine (dZ) instead of deoxyadenosine (dA) comprising the steps of:
(i) Providing a template DNA molecule to be replicated;
(ii) Providing dNTPs and wherein said dNTPs include 2-amino-2′-deoxyadenosine-triphosphate (dZTP);
(iii) Providing a polymerase, wherein the polymerase is characterized by the following features:
(a) it has an amino acid sequence which is at least 50% identical to the amino acid sequence shown in any one of SEQ ID NOs: 1 to 233;
(b) it does not show 5′-exonuclease activity;
(c) it accepts 2-amino-2′-deoxyadenosine 5′-triphosphate (dZTP) as a substrate; and
(d) it does not accept deoxyadenosine 5′-triphosphate (dATP) as a substrate; and
(iv) Incubating the components of (i) to (iii).

2. The method of claim 1, wherein the polymerase is furthermore characterized by the feature that it shows 3′-exonuclease activity.

3. The method of claim 1, wherein the polymerase is furthermore characterized by the feature that it does not show 3′-exonuclease activity.

4. The method of any one of claims 1 to 3 which furthermore comprises the step of recovering the produced DNA molecule comprising 2-amino-2′-deoxyadenosine (dZ).

5. The method of any one of claims 1 to 4 which is carried out in vitro.

6. The method of any one of claims 1 to 4 which is carried out in vivo.

7. Use of a polymerase as defined in any one of claims 1 to 3 for the production of a DNA molecule comprising 2-amino-2′-deoxyadenosine (dZ) instead of deoxyadenosine (dA).

8. A recombinant nucleic acid molecule comprising a nucleotide sequence encoding a polymerase wherein the polymerase is characterized by the following features:
(a) it has an amino acid sequence which is at least 50% identical to the amino acid sequence shown in any one of SEQ ID NOs: 1 to 233;
(b) it does not show 5′-exonuclease activity;
(c) it accepts 2-amino-2′-deoxyadenosine 5′-triphosphate (dZTP) as a substrate; and
(d) it does not accept deoxyadenosine 5′-triphosphate (dATP) as a substrate.

9. The recombinant nucleic acid molecule of claim 8, wherein the polymerase is furthermore characterized by the feature that it shows 3′-exonuclease activity.

10. The recombinant nucleic acid molecule of claim 8, wherein the polymerase is furthermore characterized by the feature that it does not show 3′-exonuclease activity.

11. The recombinant nucleic acid molecule of any one of claims 8 to 10, wherein the nucleotide sequence encoding the polymerase is operatively linked to a heterologous promoter sequence.

12. A vector comprising the recombinant nucleic acid molecule of any one of claims 8 to 11.

13. A host cell comprising the recombinant nucleic acid molecule of any one of claims 8 to 11 or the vector of claim 12.

14. A composition comprising a recombinant nucleic acid molecule of any one of claims 8 to 11, a polymerase as defined in any one of claims 8 to 10, a vector of claim 12 or a host cell of claim 13 and dZTP (and optionally further dNTPS like dTTP, dGTP and dCTP).

15. A kit comprising a recombinant nucleic acid molecule of any one of claims 8 to 11, a polymerase as defined in any one of claims 8 to 10, a vector of claim 12 or a host cell of claim 13 and dZTP (and optionally further dNTPS like dTTP, dGTP and dCTP)

16. A polymerase encoded by the nucleic acid molecule of 10.

17. The polymerase of claim 16 characterized in that it contains in its amino acid sequence a substitution at the position which corresponds to position D424 of the amino acid sequence of E. coli pol I (SEQ ID NO: 234), preferably a substitution by alanine.
